(19) United States
(12) Patent Application Publication
(10) Pub. No.: US 2014/0219983 A1
(43) Pub. Date: Aug. 7, 2014

(54) SUPPRESSION OF CANCERS

(71) Applicant: Syntaxin Limited, Abingdon (GB)

(72) Inventors: Frederic MADEC, Abingdon (GB); Phil LECANE, Abingdon (GB); Philip MARKS, Abingdon (GB); Keith FOSTER, Abingdon (GB)

(73) Assignee: Syntaxin Limited, Abingdon (GB)

(21) Appl. No.: 14/250,954

(22) Filed: Apr. 11, 2014

Related U.S. Application Data
(63) Continuation of application No. 12/996,641, filed on Mar. 11, 2011.

(30) Foreign Application Priority Data
Jun. 12, 2008 (GB) 0810782.3
Nov. 17, 2008 (GB) 0820965.2

(51) Int. Cl. C12N 9/50; C07K 14/60; C07K 14/33; C07K 14/82; C07K 7/08; C07K 14/48; C07K 14/575; C07K 14/65

(52) U.S. Cl. CPC C12N 9/50; C07K 14/575; C07K 14/60; C07K 14/65; C07K 14/57563; C07K 14/82; C07K 7/086; C07K 14/48; C07K 14/5759; C07K 14/33; C07K 2319/50; C07K 2319/33
USPC 424/94.3; 536/23.2; 514/44 R; 435/188

(57) ABSTRACT

The present invention relates to a method for suppressing or treating cancer, in particular to a method for suppressing or treating one or more of colorectal cancer, breast cancer, prostate cancer and/or lung cancer. The therapy employs use of a non-cytotoxic protease, which is targeted to a growth hormone-secreting cell such as to a pituitary cell. When so delivered, the protease is internalised and inhibits secretion/transmission of growth hormone from said cell. The present invention also relates to polypeptides and nucleic acids for use in said methods.

[0001] This application is a continuation of U.S. patent application Ser. No. 12/996,641, pending, which is a national stage application of International Application No. PCT/GB2009/050666, filed on Jun. 11, 2009. Each of the above referenced applications is incorporated by reference herein in its entirety.

[0002] Pursuant to the provisions of 37 C.F.R. §1.52(e)(5), the sequence listing text file named 98374_Seq_Listing.txt, created on Apr. 9, 2014 and having a size of 652,334 bytes, and which is being submitted herewith, is incorporated by reference herein in its entirety.

[0003] The present invention relates to the suppression of the growth, maintenance, and progression of common cancers, in particular colorectal, prostate, breast and lung cancers.

[0004] Colorectal cancer is the third most common cancer in both men and women in the United States, according to the World Health Organization's April 2003 report on global cancer rates more than 940 000 new cases are diagnosed every year and nearly 500,000 deaths are reported worldwide each year. The overall 5-year survival rate from colon cancer is approximately 60% and nearly 60,000 people die of the disease each year in the United States.

[0005] Currently employed therapies depend mainly on the location of the tumour in the colon or rectum and the stage of the disease, and may involve a) surgery, b) chemotherapy, c) biological therapy or d) radiation therapy. Surgery to remove the primary tumour is the principal first-line treatment. However, common adverse side effects of surgery include bleeding from the surgery, blood clots in the legs, and damage to nearby organs during the operation.

[0006] Surgical options include: (i) bowel resection, which involves cutting into the abdomen to reach the area of the colon or rectum that is affected by the cancer.

[0007] The surgeon removes the cancer as well as the parts of the colon or rectum that are next to it. Then the two healthy ends of the colon or rectum are sewn back together; (ii) liver resection, which involves removal of the metastasis that has spread from a colorectal area to the liver, as well as parts of the liver that are next to the cancer. Up to half of the liver can be removed as long as the rest is healthy. Two other methods to destroy cancer cells in the liver include radio waves (radiofrequency ablation) and heat (microwave coagulation), and (iii) cryosurgery (also called cryotherapy) which employs the use of liquid nitrogen to freeze and destroy colorectal cancer that has spread to the liver. It is used when the tumours in the liver are small in size.

[0008] Chemotherapy is typically employed as an adjuvant to surgery to a minority of patients, usually those whose tumour has spread to lymph nodes, for whom the benefit of chemotherapy has been clearly established. However, side effects from chemotherapy include: nausea, vomiting, loss of appetite, hair loss, mouth sores, rash on the hands and feet, and also: risk of infection, bleeding or bruising from minor injuries, and anemia-related fatigue. Chemotherapy can be given in a variety of situations: (i) primary chemotherapy is typically used when colorectal cancer is advanced and has already spread to other parts of the body. In this case, surgery cannot eliminate the cancer, so at this time the physician usually recommends chemotherapy, which can shrink tumour nodules, alleviate symptoms, and prolong life; (ii) adjuvant chemotherapy is employed when chemotherapy is given after a cancer has been surgically removed. The surgery may not eliminate all the cancer, so the adjuvant chemotherapy treatment is often used to kill any cancer cells that may have been missed, such as cells that may have metastasized or spread to the liver; and (iii) neoadjuvant chemotherapy may be employed prior to surgery in order to shrink the tumour so the surgeon can completely remove the tumour with fewer complications. Chemotherapy is often given with radiation to make the radiation more effective.

[0009] Biological therapy can be prescribed to people having cancer, which has already spread. Current therapies include the use of: (i) biological response modifiers, which do not directly destroy the cancer, but instead trigger the immune system to react against the tumours. Biological response modifiers include cytokines such as interferons and interleukins. However, this strategy involves use of large administration doses by injection or infusion in the hope of stimulating the cells of the immune system to act more effectively. In addition, use of biological response modifiers is often associated with flu-like symptoms including fever, chills, nausea, and loss of appetite. Further undesirable side effects include: rashes or swelling at the site of injection, a blood pressure drop as a result of treatment, and fatigue; (ii) colony-stimulating factors, which stimulate the production of bone marrow cells such as red and white blood cells and platelets. Thus, colony-stimulating factors do not directly affect tumours but, instead, help support the immune system during cancer treatment. Regrettably, however, the use of colony-stimulating factors is associated with undesirable side effects such as bone pain, fatigue, fever, and loss of appetite; and (iii) tumour vaccines, which encourage the immune system to recognize cancer cells. Said vaccines are typically employed after the onset of cancer, and are therefore suppressive rather than preventative. Efficacy is poor, and the use of tumour vaccines is associated with muscle aches and low-grade fever.

[0010] A major difficulty with the treatment of colorectal cancers is that 20-25% of patients have clinical detectable liver metastases at the time of the initial diagnosis and a further 40-50% of patients develop liver metastases within three years after primary surgery, usually metastatic disease develops first in the liver.

[0011] Breast cancer is the most common type of cancer in women with the exception of non-melanoma skin cancers. It is estimated that almost 180,000 new cases of invasive breast cancer would be diagnosed among women in the United States in 2007. A woman has a lifetime risk of developing invasive breast cancer of about one in eight (13%).

[0012] Current therapies include: surgery, radiation therapy, chemotherapy, hormone therapy, and biological therapy. The choice of one therapy over another involves consideration of the size and location of the tumour, histological factors such as lymphatic invasion and histological subtype determination, the stage or extent of the disease, and the age and general health of the patient.

[0013] Surgery options include mastectomy or lumpectomy (also called breast conserving therapy or partial mastectomy), with or without lymph node removal. Unfortunately, patients who have undergone mastectomy often suffer from one or more of: wound infection and abscess, necrosis of skin flap, paresthesia of chest wall, phantom breast syndrome, post-surgical pain syndrome, seroma or lymphedema. Similarly, complications associated with lumpectomy include: injury or thrombosis of the axillary vein, seroma formation, lymphedema, impairment of shoulder movements, damage to the brachial plexus, and chest wall pain.

[0014] Radiation therapy is associated with complications such as: necrosis of the breast soft tissue, prolonged breast oedema, rib fracture, decreased shoulder mobility, brachial plexopathy with paresthesia and arm pain, lymphedema, angiosarcoma, lung cancer, coronary artery disease, and symptomatic pneumonitis.

[0015] Current chemotherapy options, however, go hand-in-hand with undesirable side effects such as: nausea, hair loss, early menopause, hot flushes, fatigue and temporarily lowered blood counts. In addition, more severe side-effects include: liver toxicity, hemorrhagic cystitis, amenorrhea, cerebellar ataxia, myocardial dysfunction, peripheral neuropathy, myelosuppression, neurotoxicity, alopecia, and pleural effusion.

[0016] Hormone therapies have to-date focussed on the use of Tamoxifen™, and/or the use of aromatase inhibitors such as Arimidex™, Aromasin™ and Femara™.

[0017] These therapeutic molecules act by suppressing hormone, especially oestrogen, activity and thus inhibit the growth of breast cancer cells that may remain after breast cancer surgery. Regrettably, however, hormone therapies are associated with undesirable side effects such as hot flushes and vaginal dryness. In particular, Tamoxifen™ treatment has been shown to increase the risk of endometrial cancer, induce perimenopausal symptoms, and increase the risk of developing cataracts.

[0018] Biological therapies have to-date focussed on the use of Herceptin™. However, the use of this therapeutic molecule is associated with adverse effects such as:

[0019] cardiac toxicity, fever, chills, nausea, vomiting and pain can occur especially after the first infusion.

[0020] Prostate cancer is the second greatest cause of death in the United States in men dying from cancer and is the most common cancer diagnosed in American males. In the US it is estimated that 1 in 10 men will develop prostate cancer in their lifetime.

[0021] As with other cancer types, available treatments depend on a variety of factors, such as the grade and stage of the cancer, the age, and general health of the patient. Current therapies include: (i) watchful waiting based on PSA blood tests, which are performed regularly to check that the condition of a patient hasn't deteriorated. This approach is recommended for small, slow growing, non-aggressive cancers affecting elderly men where the cancer does not affect their life expectancy; (ii) prostatectomy (i.e. removal of the prostate), though this is associated with side effects such as: bladder control problems, urinary leakage, impotence, and anastomotic stricture; (iii) radiotherapy, such as external-beam radiation therapy (EBRT) using high-powered x-rays, though this therapy is associated with rectal problems, persistent bleeding, and rectal ulcer. Alternatively, radioactive seed implants, which are implanted directly into the prostate may be employed. This therapy is also known as brachytherapy, and delivers a lower dose of radiation (though over a longer period of time) than is typically achieved via external beams. Unfortunately, this type of therapy is associated with complications such as slow and painful urination, and impotence; (iv) hormone therapy, which is designed to prevent male sex hormones from stimulating cancer cell growth. This is typically achieved by chemical inhibition of male sex hormone secretion, or by surgical means (testicles removal). Unfortunately, these therapies are associated with side effects such as: breast enlargement, reduced sex drive, impotence, hot flushes, weight gain, and reduction in muscles and bone mass. In addition, some hormone therapy drugs have been shown to cause nausea, diarrhoea, fatigue, and liver damage; (v) chemotherapy—employing the same type of drugs as described above in the context of colorectal, breast or prostate cancer; and (vi) cryotherapy, which destroys the cancer cells by freezing the affected tissue. Regrettably, this therapy is limited due to difficulties in monitoring the extent of the freezing process, which frequently results in damage to tissues around the bladder and long term complications (e.g. injury to the rectum or the muscles controlling urination).

[0022] Lung cancer is the leading cause of cancer-related mortality for both men and women in the world. Worldwide lung cancer remains the most common malignancy, with an estimated 1.04 million new cases each year, it represents 12.8% of new cancer cases diagnosed. Lung cancer is the cause of 921,000 deaths each year in the world, accounting for almost 18% of cancer related deaths.

[0023] Current lung cancer therapies involve surgery, radiotherapy and chemotherapy, either separately or in combination. When employing said therapies, physicians take into account: the type of lung cancer (small cell or non-small cell), the size and position of the tumour, the stage of the tumour (presence of metastasis or not outside the lung), and the general health of the patient.

[0024] For non-small cell lung cancers (NSCLC), currently available treatments include: (i) chemotherapy—unfortunately, NSCLC is only moderately sensitive to chemotherapy. Single-agent therapy response rates are in the region of 15%, with newer agents (e.g. Gemcitabine™, Paclitaxel™, Docetaxel™, Vinorelbine™) having slightly higher response rates (20-25%). In addition, chemotherapy is associated with complications such as: a drop in the number of blood cells, nausea, vomiting, diarrhoea, sore mouth and mouth ulcers, hair loss, and fatigue; (ii) biological therapy-recent research efforts have focused heavily on identifying molecular targets and using this knowledge to develop molecular-targeted therapies. Whilst several molecular-targeted therapies are currently being developed and tested in NSCLC, these therapies are associated with undesirable side effects including: flu-like symptoms, such as: chills, fever, muscle aches, fatigue, loss of appetite, nausea, vomiting, and diarrhoea; (iii) radiation therapy. This type of therapy is typically employed as an adjuvant to surgery, or alone when surgical resection is not possible because of limited pulmonary reserve or the presence of comorbid conditions. Alone, radiation therapy, is only associated with 12-16% survival after 5-year in early stage NSCLC. Regrettably, complications are common, and include: nausea, fatigue, skin reaction, hair loss, persistent cough, dry or sore throat, and swallowing difficulties; (iv) combined chemo-radiotherapy-recently studies have shown limited survival in patients with unresectable stage III disease when treated with concurrent (rather than sequential) platinum-based chemotherapy and radiation therapy. As with the above-described cancer types, however, the use of chemotherapy and radiotherapy has a number of undesirable side effects; (v) surgery—this is typically employed when the tumour is at an early stage and/or if the tumour has not spread. Examples include: wedge resection, which involves the removal of a triangle-shaped slice of tissue. Wedge resection is used to remove a tumour and a small amount of normal tissue around it. When a slightly larger amount of tissue is taken, it is called a segmental resection; lobectomy, which involves the removal of a whole lobe (section) of the lung; and pneumonectomy, which involves the removal of one whole lung. The side effects encountered after these interventions include: pain, infection but also: pneumonia, bleeding, blood clots, and other infections. In addition, the perioperative mortality rate is 6% for pneumonectomy, 3% for lobectomy, and 1% for segmentectomy.

[0025] For Small Cell Lung Cancer (SCLC), currently available treatments include: (i) chemotherapy—single-agent chemotherapy shows a rate of response ranging from 17% to 50%. Combination chemotherapy is associated with superior response rates and survival, though major side effects include: myelosuppression, nephrotoxicity, tumour lysis syndrome (characterized by: hyperuricemia, hyperphosphatemia, hypocalcemia, dehydration, and hyperkalemia), spinal cord compression, and hyponatremia; (ii) radiation therapy—this therapy is only used to palliate symptoms, and patients invariably relapse; (iii) surgery—most patients with SCLC are treated non-surgically. The exceptions are a relatively small number of patients (<5%) who present very early stage disease confined to the lung without any lymph node involvement. Such patients usually undergo resection of lung tumours as an initial diagnostic procedure. However, even for these patients, surgery alone is not considered curative.

[0026] Patients with relapsed SCLC have an extremely poor prognosis, approximately 65-70% of patients with SCLC have disseminated disease at presentation.

[0027] Extensive-stage SCLCs are currently uncurable, and patients with extensive disease have median survival duration of less than 1 year. Even patients presenting with localized disease (i.e. limited stage) have median survival duration of less than 2 years. The 5-year survival rate for SCLC is less than 20%.

[0028] Referring to all of the above-discussed, currently-available therapies (for each of discussed cancer types—colorectal, breast, prostate, and lung cancer), there is a further problem, namely tumour lysis syndrome (TLS). TLS is a very serious and sometimes life-threatening complication of cancer therapy. It can be defined as a constellation of metabolic abnormalities resulting from spontaneous or treatment-related tumour necrosis or fulminant apoptosis. The metabolic abnormalities observed in patients with TLS include: hyperkalemia, hyperuricemia, and hyperphosphatemia with secondary hypocalcemia; and can lead to acute renal failure (ARF).

[0029] Cancer (especially colorectal cancer, breast cancer, prostate cancer, and lung cancer) continues to pose a major problem for animal healthcare on a global scale. Accordingly, there is a need in the art for alternative and/or improved cancer therapeutics and therapies that address one or more of the above problems.

[0030] The present invention solves one or more of said problems, by providing a new category of non-cytotoxic, anticancer agent.

[0031] In more detail, a first aspect of the present invention provides a polypeptide for use in treating cancer, said polypeptide comprising:
[0032] a a non-cytotoxic protease, which protease is capable of cleaving a protein of the exocytic fusion apparatus in a growth hormone-secreting cell;
[0033] b. a Targeting Moiety (TM) that is capable of binding to a Binding Site on a growth hormone-secreting cell, which Binding Site is capable of undergoing endocytosis to be incorporated into an endosome within the growth hormone-secreting cell; and
[0034] c. a translocation domain that is capable of translocating the protease from within an endosome, across the endosomal membrane and into the cytosol of the growth hormone-secreting cell.

[0035] In use, a polypeptide of the invention binds to a growth hormone-secreting cell. Thereafter, the translocation component effects transport of the protease component into the cytosol of the growth hormone-secreting cell. Finally, once inside, the protease inhibits the exocytic fusion process of the growth hormone-secreting cell. Thus, by inactivating the exocytic fusion apparatus of the growth hormone-secreting cell, the polypeptide of the invention inhibits the release/secretion of growth hormone therefrom.

[0036] The ‘bioactive’ component of the polypeptides of the present invention is provided by a non-cytotoxic protease. This distinct group of proteases act by proteolytically-cleaving intracellular transport proteins known as SNARE proteins (e.g. SNAP-25, VAMP, or Syntaxin)—see Gerald K (2002) “Cell and Molecular Biology” (4th edition) John Wiley & Sons, Inc. The acronym SNARE derives from the term Soluble NSF Attachment Receptor, where NSF means N-ethylmaleimide-Sensitive Factor. SNARE proteins are integral to intracellular vesicle formation, and thus to secretion of molecules via vesicle transport from a cell. Accordingly, once delivered to a desired target cell, the non-cytotoxic protease is capable of inhibiting cellular secretion from the target cell.

[0037] The principal target cells to which polypeptides of the present invention bind are normal, non-diseased, non-cancerous cells that secrete growth hormone. These cells are, however, distinct from the ultimate ‘downstream’ cancer cells that are treated in accordance with the present invention.

[0038] The present invention provides polypeptides that are capable of (and for use in) reducing/minimising systemic or serum levels of growth hormone and/or insulin-like growth factor (IGF-1). Also provided, are polypeptides for use in reducing/minimising tumour lysis syndrone (TLS).

[0039] The polypeptides of the present invention are particularly suited for use in treating one or more of: colorectal cancer, breast cancer, prostate cancer and/or lung cancer (e.g. SCLC or NSCLC); including their metastases, precancerous conditions and symptoms thereof. In this regard, ‘treating’ includes reducing, preventing or eliminating cancer cells or the spread thereof in the local, regional or systemic circulation.

[0040] Thus, in a related aspect of the present invention, there is provided a method for treating cancer in a patient, said method comprising administering to the patient a therapeutically effective amount of a polypeptide of the present invention. The present invention also provides a method for reducing growth hormone and/or IGF-1 levels (preferably systemic and/or serum levels) in a patient, said method comprising administering to the patient a therapeutically effective amount of a polypeptide of the present invention. By way of example, in one embodiment, the present invention permits maintenance of a basal level of growth hormone at a threshold of around 10 ng/ml, preferably less than 6 ng/ml, more preferably less than 4 or 5 ng/ml. In a normal person, daily growth hormone levels may typically peak around one hour after the onset of sleep at a level of approximately 35 ng/ml. In this regard, in one embodiment, the present invention permits said peak to be controlled at a threshold of around 25 ng/ml, preferably less than 20 ng/ml, more preferably less than 15 ng/ml. Also provided, is a method for reducing/minimising tumour lysis syndrone (TLS).

[0041] Without wishing to be bound by any theory, the present inventors believe that an elevated systemic level of growth hormone causes the level of systemic IGF-1 to become elevated, and that the latter is responsible for increased IGF-1R activation and an associated increase in oncogene activation, which in turn leads to increased cellular proliferation and the formation/growth of tumours.

[0042] Following administration of a polypeptide of the present invention, a decrease in the secretion of growth hormone (e.g. human GH) from the anterior part of pituitary is observed. Similarly, a reduction of the level of circulating IGF-1 level is observed. Said decrease in GH/IGF-1 level is correlated with shrinkage of the tumour. Thus, use of the polypeptides of the present invention provides a favourable environment for cancer treatment by removing one of the major counter-acting biological pathways.

[0043] Following administration, the regional and distant spread of the cancer is reduced or eliminated. In this regard, without wishing to be bound by any theory, the present inventors believe that the spread of a metastasis is inhibited by the polypeptides of the present invention, which lower of the circulatory concentration of IGF-1.

[0044] An advantage of the present invention is that, after treatment of the cancer, the pituitary functioning returns to normal. In other words, the present invention provides a short-acting therapy that has a minimal post-therapy effect on the pituitary. Thus, in contrast to current hypophysectomy therapies, the present invention avoids the need for complex and unpleasant post-treatment (typically, life-long) regimens to prevent complications resulting from the initial cancer treatment, such as: osteoporosis, short bowel syndrome, memory loss which can lead to Alzheimer's, arthritis, back pain, fibromyalgia and chronic fatigue.

[0045] The biologically active component of the polypeptides of the present invention is a non-cytotoxic protease. Non-cytotoxic proteases are a discrete class of molecules that do not kill cells; instead, they act by inhibiting cellular processes other than protein synthesis. Non-cytotoxic proteases are produced as part of a larger toxin molecule by a variety of plants, and by a variety of microorganisms such as Clostridium sp. and Neisseria sp.

[0046] Clostridial neurotoxins represent a major group of non-cytotoxic toxin molecules, and comprise two polypeptide chains joined together by a disulphide bond. The two chains are termed the heavy chain (H-chain), which has a molecular mass of approximately 100 kDa, and the light chain (L-chain), which has a molecular mass of approximately 50 kDa. It is the L-chain, which possesses a protease function and exhibits a high substrate specificity for vesicle and/or plasma membrane associated (SNARE) proteins involved in the exocytic process (eg. synaptobrevin, syntaxin or SNAP-25). These substrates are important components of the neurosecretory machinery.

[0047] Neisseria sp., most importantly from the species N. gonorrhoeae, and Streptococcus sp., most importantly from the species S. pneumoniae, produce functionally similar non-cytotoxic toxin molecules. An example of such a non-cytotoxic protease is IgA protease (see WO99/58571, which is hereby incorporated in its entirety by reference thereto).

[0048] Thus, the non-cytotoxic protease of the present invention is preferably a clostridial neurotoxin protease or an IgA protease.

[0049] Turning now to the Targeting Moiety (TM) component of the present invention, it is this component that binds the polypeptide of the present invention to a growth hormone-secreting cell, preferably to a pituitary cell and/or to an extrapituitary cell. In one embodiment, the TM binds to the anterior region of the pituitary gland, for example to a somatotroph and/or to a cell of the adenohypophysis.

[0050] Suitable TMs include: ligands to growth hormone-secreting cell receptors such as cytokines, growth factors, neuropeptides, lectins, and antibodies—this term includes monoclonal antibodies, and antibody fragments such as Fab, F(ab)′₂, Fv, ScFv, etc.

[0051] A TM of the invention binds to a receptor on a growth hormone-secreting cell, such as a pituitary cell. By way of example, the TM may bind to a leptin (OB) receptor and isoforms thereof, a ghrelin receptor, a somatostatin (sst) receptor (e.g. sst₁, sst₂, sst₃, sst₄ and sst₅ and splice variants thereof), an insulin growth factor (IGF) receptor (e.g. IGF-1), an erbB receptor (e.g. erbB1, erbB2, erbB3 and erbB4, and splice variants thereof), a VIP-glucagon-GRF-secretin superfamily receptor (including splice variants thereof) such as a pituitary adenylate cyclase activating peptide (PACAP) receptor (e.g. PAC, VPAC₁ and/or VPAC₂), an orexin (OX) receptor and splice variants (e.g. OX₁ and/or OX₂), an interleukin (IL) receptor (e.g. Il-1, IL-2, IL-6 and IL-10 receptor), a nerve growth factor (NTR) receptor (e.g. TrkA(NTR) and p75(NTR)), a vascular endothelial growth factor (VEGF) receptor (e.g. VEGFR1, VEGFR2 and VEGFR3), a bombesin receptor (eg. BRS-1, BRS-2, or BRS-3), a urotensin receptor, a melanin-concentrating hormone receptor 1, a prolactin releasing hormone receptor, a KiSS-1 receptor, a corticotropin-releasing factor receptor 1 and a growth hormone-releasing hormone (GHRH) receptor.

[0052] In one embodiment, a TM of the present invention binds to a leptin receptor. Suitable examples of such TMs include: leptin peptides such as a full-length leptin peptide (eg. leptin₁₆₇), and truncations or peptide analogues thereof such as leptin₂₂₋₁₆₇, leptin₇₀₋₉₅, and leptin₁₁₆₋₁₂₂.

[0053] In another embodiment, a TM of the present invention binds to a ghrelin receptor. Examples of suitable TMs in this regard include: ghrelin peptides such as full-length ghrelin (eg. ghrelin₁₁₇) and truncations or peptide analogues thereof such as ghrelin₂₄₋₁₁₇, and ghrelin₅₂₋₁₁₇; [Trp3, Arg5]-ghrelin (1-5), des-Gln-Ghrelin, cortistatin-8, His-D-Trp-Ala-Trp-D-Phe-Lys-NH₂, growth hormone releasing peptide (e.g. GHRP-6), or hexarelin.

[0054] In one embodiment, a TM of the present invention binds to a somatostatin (SST) receptor. By way of example, suitable TMs include: SST peptides and cortistatin (CST)-peptides, as well as peptide analogues thereof such as D-Phe-Phe-Phe-D-Trp-Lys-Thr-Phe-Thr-NH₂ (BIM 23052), D-Phe-Phe-Tyr-D-Trp-Lys-Val-Phe-D-Nal-NH₂ (BIM 23056) or c[Cys-Phe-Phe-D-Trp-Lys-Thr-Phe-Cys]-NH₂ (BIM-23268). Further examples include the SST peptides SST-14 and SST-28; as well as peptide and peptide analogues such as: octreotide, lanreotide, BIM23027, vapreotide, seglitide, and SOM230. These TMs are preferred TMs for binding to SST receptors, in particular to sst₁, sst₂, sst₃, sst₄ and sst₅ receptors.

[0055] In one embodiment, a TM of the present invention binds to insulin-like growth factor (IGF) receptor. Suitable examples include, for example IGF-1 peptides and IGF-2 peptides.

[0056] In one embodiment, a TM of the present invention binds to a VIP-glucagon-GRF-secretin superfamily receptor, such as to a PAC (eg. PAC₁) or to a VPAC (e.g. VPAC-1 or VPAC-2) receptor. Suitable examples of such TMs include pituitary adenylate cyclase-activating peptides (PACAP), vasoactive intestinal peptides (VIP), as well as truncations and peptide analogues thereof.

[0057] In one embodiment the TM is a VIP peptide including VIP-1 and VIP-2 peptides, for example VIP(1-28), or a truncation or peptide analogue thereof. These TMs demonstrate a selective binding to VPAC-1. Alternatively, a TM demonstrating a selective binding to VPAC2 may be employed, such as, for example mROM (see Yu et al., Peptides 27 (6) p1359-66 (2006), which is hereby incorporated by reference thereto). In another embodiment, the TM may be a PACAP peptide, for example PACAP(1-38) or PACAP(1-27), or a truncation of peptide analogue thereof. These TMs are preferred TMs for binding to PAC (eg. PAC-1) receptors.

[0058] In another embodiment, a TM of the present invention binds to an orexin receptor (eg. OX₁ or OX₂ receptors). Examples of suitable TMs include: full-length orexin-A peptides and truncations or peptide analogues thereof, and orexin-B peptides and truncations or peptide analogues thereof.

[0059] In one embodiment, a TM of the present invention binds to an interleukin receptor. Suitable TM examples include: IL-1 peptides (e.g. IL-1α, IL-β, IL-18 peptides) and truncations or peptide analogues thereof, IL-2 peptides (e.g. IL-2, IL-3, IL-12, IL-23 peptides) and truncations or peptide analogues thereof, and IL-17 peptides (e.g. II-17A, IL-17C peptides) and truncations or peptide analogues thereof.

[0060] In another embodiment, a TM of the present invention binds to an NGF receptor. Examples of suitable TMs include full-length NGF, and truncations or peptide analogues thereof.

[0061] In one embodiment, a TM of the present invention binds to a vasoactive epidermal growth factor (VEGF) receptor. Examples of suitable TMs include: VEGF peptide (e.g. VEGF-A, VEGF-B, VEGF-C, VEGF-D or VEGF-E and associated splice variants) and truncations or peptide analogues thereof, and placental growth factor (PIGF) and truncations or peptide analogues thereof.

[0062] In another embodiment, a TM of the present invention binds to an ErbB receptor. By way of example, the TM is selected from EGF peptides, transforming growth factor-α (TGF-α) peptides, chimeras of EGF and TGF-α, amphiregulin peptides, betacellulin peptides, epigen peptides, epiregulin peptides, heparin-binding EGF (HB-EGF) peptides, neuregulin (NRG) peptides such as NRG1α, NRG1β, NRG2α, NRG2β, NRG3, NRG4 and neuroregulin splice variants, tomoregulin 1 and 2 peptides, neuroglycan-C peptides, lin-3 peptides, vein peptides, gurken peptides, spitz peptides, or keren peptides; as well as truncations and peptide analogues thereof. There are 4 classes of ErbB receptor (termed ErbB1, erbB2, erbB3 and erbB4), which are also referred to as HER receptors. A number of variants of these receptors exist, which arise from alternate splicing and/or cleavage of the full-length receptor (eg EGFR v1 translation starts at aa543; EGFR vii deletion of aa521-603; EGFR v111 deletion of aa 6-273; EGFRvIII/Δ12-13 deletion of aa 6-273 and 409-520; EGFR vIV deletion of aa 959-1030; EGFR vV truncation at residue 958; EGFR TDM/2-7 tandem duplication of 6-273; EGFR TDM/18-25 tandem duplication of 664-1030; EGFR-TDM/18-26 tandem duplication of 664-1014). In addition, there are four ErbB4 receptor isoforms called erbB4 JM-a, erbB4 JM-b, erbB4 CYT-1 and erbB4 CYT-1.

[0063] Preferred TMs bind to ErbB receptors (eg. ErbB1, ErbB2, ErbB3, ErbB4) and splice variants thereof, in particular the ErbB1 receptor. ErbB TMs may also include proteins which contain EGF motifs with a splice site between the fourth and fifth cysteines within the six cysteine EGF-module, where this module is placed in close proximity to the transmembrane region of the potential ligand. For example, interphotoreceptor matrix proteoglycan-2 (IMP-2), meprin (MEP)1α, MEP1β, mucin (MUC)3, MUC4, MUC12. and MUC17, as well as proteins with a T-knot scaffold such as potato carboxypeptidase inhibitor, and antibodies to ErbB receptors such as cetuximab, ABX-EGF, trastuzumab, or EMD72000. Further examples include chimeras generated by swapping domains (loop sequences and/or connecting amino acids) of different ErbB ligands, such as a mammalian erbB receptor ligand in which the B-loop sequence has replaced by those present in the insect (Drosophila) ErbB ligands, an ErbB ligand in which the C-loop sequence of EGF has been replaced by that of TGFα(44-50), EGF ligands in which one or more domain has been replaced by corresponding sequences in TGFα to create EGF/TGFα chimeras (e.g. E3T, T3E, E4T, T4E, T3E4T, T6E and E3T4E, and EGF chimeras in which the N-terminal TGFα sequence (WSHFND) or the neuregulin sequence (SHLVK) has been used to replace the N-terminal EGF sequence C-terminal of the first cysteine residue (NSDSE), T1E, and Biregulin. Yet further chimeras include EGF in which a domain has been replaced by an EGF-like domain of another protein, such as a blood coagulation, neural development or cell adhesion protein (e.g. Notch 3, Delta 1, EMR1, F4/80, EMR3 and EMR4 receptors).

[0064] In a further embodiment, a TM of the present invention binds to a melanin-concentrating hormone receptor 1. Examples of suitable TMs in this regard include: melanin-concentrating hormone (MCH) peptides such as full-length MCH, truncations and analogues thereof.

[0065] In another embodiment, a TM of the present invention binds to a prolactin releasing hormone receptor. An example of a suitable TM in this regard includes prolactin releasing peptide, truncations and analogues thereof.

[0066] In a further embodiment, a TM of the present invention binds to a KiSS-1 receptor. Examples of suitable TMs in this regard include Kisspeptin-10, Kisspeptin-54 peptides, truncations and analogues thereof.

[0067] In another embodiment, a TM of the present invention binds to a a corticotropin-releasing factor receptor 1. Example of a suitable TM in this regard includes corticotropin-releasing hormone, urocortin 1 and urocortin 2, including truncations and analogues thereof.

[0068] In another embodiment, a TM of the present invention binds to a growth-hormone-releasing hormone (GHRH) receptor. GHRH is also known as growth-hormone-releasing factor (GRF or GHRF) or somatocrinin. Suitable TM examples of the present invention include the full-length GHRH (1-44) peptide, and truncations or peptide analogues thereof such as GHRH(1-29); GHRH(1-37); hGHRH(1-40)-OH; [MeTyr1, Ala15,22, Nle27]-hGHRH(1-29)-NH2; [MeTyr1, Ala-8,9,15,22,28, Nle 27]-hGHRH(1-29)-NH2; cyclo(25-29)[MeTyr1, Ala15, DAsp25, NIle27, Orn29+++]-hGHRH(1-29)-NH2; (D-Tyr1)-GHRH (1-29)-NH2; (D-Ala2)-GHRH (1-29)-NH2; (D-Asp3)-GHRH (1-29)-NH2 (D-Ala4)-GHRH (1-29)-NH2; (D-Thr7)-GHRH (1-29)-NH2; (D-Asn8)-GHRH (1-29)-NH2; (D-Ser9)-GHRH (1-29)-NH2; (D-Tyr10)-GHRH (1-29)-NH2; (Phe4)-GHRH (1-29)-NH2; (pCI-Phe6)-GHRH (1-29)-NH2; (N-Ac-Tyr1)-GHRH (1-29)-NH2; (N-Ac-Tyr1, D-Ala2)-GHRH (1-29)-NH2; (N-Ac-D-Tyr1, D-Ala2)-GHRH (1-29)-NH2; (N-Ac-D-Tyr1, D-Ala 2, D-Asp3)-GHRH (1-29)-NH2; (D-Ala2, NLeu27)-GHRH (1-29)-NH2; (Hist D-Ala2, NLeu27)-GHRH (1-29)-NH2; (N-Ac-Hist, D-Ala2, N-Leu27)-GHRH (1-29)-NH2; (Hist D-Ala 2, D-Ala 4, Nleu27)-GHRH (1-29)-NH2; (D-Ala2, D-Asp3, D-Asn8, NLeu27)-GHRH (1-29)-NH2; (D-Asp3, D-Asn8, NLeu27)-GHRH (1-29)-NH2; [Hist NLeu27]-hGHRH(1-29)-NH2; [NLeu27]-hGHRH(1-29)-NH2; H-Tyr-Ala-Asp-Ala-Ile-Phe-Thr-Asn-Ser-Tyr-Arg-Lys-Val-Leu-Gly-Gln-Leu-Ser-Ala-Arg-Lys-Leu-Leu-Gln-Asp-Ile-Met-Ser-Arg-Gln-Gln-Gly-Glu-Ser-Asn-Gln-Glu-Arg-Gly-Ala-Arg-Ala-Arg-Leu-NH2 (SEQ ID NO: 88); H-Tyr-Ala-Asp-Ala-Ile-Phe-Thr-Asn-Ser-Tyr-Arg-Lys-Val-Leu-Gly-Gln-Leu-Ser-Ala-Arg-Lys-Leu-Leu-Gln-Asp-Ile-Met-Ser-Arg-NH2 (SEQ ID NO: 89); H-Tyr-D-Ala-Asp-Ala-Ile-Phe-Thr-Asn-Ser-Tyr-Arg-Lys-Val-Leu-Gly-Gln-Leu-Ser-Ala-Arg-Lys-Leu-Leu-Gln-Asp-Ile-Met-Ser-Arg-NH2 (SEQ ID NO: 90); H-Tyr-Ala-Asp-Ala-Ile-Phe-Thr-Asn-Ser-Tyr-Arg-Lys-Ile-Leu-Gly-Gln-Leu-Ser-Ala-Arg-Lys-Leu-Leu-Gln-Asp-Ile-Met-Asn-Arg-Gln-Gln-Gly-Glu-Arg-Asn-Gln-Glu-Gln-Gly-Ala-Lys-Val-Arg-Leu-NH2 (SEQ ID NO: 91); H-Tyr-Ala-Asp-Ala-Ile-Phe-Thr-Asn-Ser-Tyr-Arg-Lys-Val-Leu-Gly-Gln-Leu-Ser-Ala-Arg-Lys-Leu-Leu-Gln-Asp-Ile-Met-Asn-Arg-Gln-Gln-Gly-Glu-Arg-Asn-Gln-Glu-Gln-Gly-Ala-Lys-Val-Arg-Leu-NH2 (SEQ ID NO: 92); His-Val-Asp-Ala-Ile-Phe-Thr-Gln-Ser-Tyr-Arg-Lys-Val-Leu-Ala-Gln-Leu-Ser-Ala-Arg-Lys-Leu-Leu-Gln-Asp-Ile-Leu-Asn-Arg (SEQ ID NO: 93); and His-Val-Asp-Ala-Ile-Phe-Thr-Gln-Ser-Tyr-Arg-Lys-Val-Leu-Ala-Gln-Leu-Ser-Ala-Arg-Lys-Leu-Leu-Gln-Asp-Ile-Leu-Asn-Arg-Gln-Gln-Gly-Glu-Arg-Asn-Gln-Glu-Gln-Gly-Ala (SEQ ID NO: 94).

[0069] In a further embodiment, the TM binds to a bombesin receptor (eg. BRS-1, BRS-2, or BRS-3). TMs for use in the present invention that bind to a bombesin receptor include: bombesin—a 14 amino acid peptide originally isolated from the skin of a frog (pGlu-Gln-Arg-Leu-Gly-Asn-Gln-Trp-Ala-Val-Gly-His-Leu-Met-NH2) (SEQ ID NO: 95); and the two known homologs in mammals, namely neuromedin B, and gastrin releasing peptide (GRP) such as porcine GRP-Ala-Pro-Val-Ser-Val-Gly-Gly-Gly-Thr-Val-Leu-Ala-Lys-Met-Tyr-Pro-Arg-Gly-Asn-His-Trp-Ala-Val-Gly-His-Leu-Met-NH2 (SEQ ID NO: 96), and human GRP-Val-Pro-Leu-Pro-Ala-Gly-Gly-Gly-Thr-Val-Leu-Thr-Lys-Met-Tyr-Pro-Arg-Gly-Asn-His-Trp-Ala-Val-Gly-His-Leu-Met-NH2 (SEQ ID NO: 97). Additional TMs include corresponding bombesin, neuromedin B and GRP truncations as well as peptide analogues thereof.

[0070] In another embodiment, a TM of the present invention binds to a urotensin receptor. Suitable TMs in this regard include urotensin peptides such as Urotensin-II (U-II), which is a cyclic neuropeptide, as well as truncations and peptide analogues thereof. The C-terminal cyclic region of U-II is strongly conserved across different species, and includes the six amino acid residues (-Cys Ple-Trp-Lys-Tyr-Cys-) (SEQ ID NO: 98), which is structurally similar to the central region of somatostatin-14 (-Phe-Trp-Lys-Thr) (SEQ ID NO: 99). Urotensin peptides suitable for use in the present invention include the U-II precursor peptides, such as prepro-urotensin-II (including the two human 124 and 139 isoforms thereof), and truncations and anlogues thereof such as the eleven residue mature peptide form.

[0071] According to a second aspect of the present invention, there is provided a composition of matter, namely a polypeptide comprising:
[0072] a a non-cytotoxic protease, which protease is capable of cleaving a protein of the exocytic fusion apparatus in a growth hormone-secreting cell;
[0073] b. a Targeting Moiety (TM) that is capable of binding to a Binding Site on a growth hormone-secreting cell, which Binding Site is capable of undergoing endocytosis to be incorporated into an endosome within the growth hormone-secreting cell; and
[0074] d. a translocation domain that is capable of translocating the protease from within an endosome, across the endosomal membrane and into the cytosol of the growth hormone-secreting cell.

[0075] All of the features of the first aspect of the present invention apply equally to the above-described second aspect.

[0076] In a preferred embodiment of the first and/or second aspects of the present invention, the TM has a human peptide amino acid sequence. Thus, a preferred TM is, for example, a human GHRH peptide, a human CST peptide or a human SST peptide.

### Polypeptide Preparation

[0077] The polypeptides of the present invention comprise 3 principal components: a ‘bioactive’ (ie. a non-cytotoxic protease); a TM; and a translocation domain. The general technology associated with the preparation of such fusion proteins is often referred to as re-targeted toxin technology. By way of exemplification, we refer to: WO94/21300; WO96/33273; WO98/07864; WO00/10598; WO01/21213; WO06/059093; WO00/62814; WO00/04926; WO93/15766; WO00/61192; and WO99/58571. All of these publications are herein incorporated by reference thereto.

[0078] In more detail, the TM component of the present invention may be fused to either the protease component or the translocation component of the present invention. Said fusion is preferably by way of a covalent bond, for example either a direct covalent bond or via a spacer/linker molecule. The protease component and the translocation component are preferably linked together via a covalent bond, for example either a direct covalent bond or via a spacer/linker molecule. Suitable spacer/linked molecules are well known in the art, and typically comprise an amino acid-based sequence of between 5 and 40, preferably between 10 and 30 amino acid residues in length.

[0079] In use, the polypeptides have a di-chain conformation, wherein the protease component and the translocation component are linked together, preferably via a disulphide bond.

[0080] The polypeptides of the present invention may be prepared by conventional chemical conjugation techniques, which are well known to a skilled person. By way of example, reference is made to Hermanson, G. T. (1996), Bioconjugate techniques, Academic Press, and to Wong, S. S. (1991), Chemistry of protein conjugation and cross-linking, CRC Press, Nagy et al., PNAS 95 p1794-99 (1998). Further detailed methodologies for attaching synthetic TMs to a polypeptide of the present invention are provided in, for example, EP0257742. The above-mentioned conjugation publications are herein incorporated by reference thereto.

[0081] Alternatively, the polypeptides may be prepared by recombinant preparation of a single polypeptide fusion protein (see, for example, WO98/07864). This technique is based on the in vivo bacterial mechanism by which native clostridial neurotoxin (ie. holotoxin) is prepared, and results in a fusion protein having the following ‘simplified’ structural arrangement:

NH₂-[protease component]-[translocation component]-[TM]-COOH

[0082] According to WO98/07864, the TM is placed towards the C-terminal end of the fusion protein. The fusion protein is then activated by treatment with a protease, which cleaves at a site between the protease component and the translocation component. A di-chain protein is thus produced, comprising the protease component as a single polypeptide chain covalently attached (via a disulphide bridge) to another single polypeptide chain containing the translocation component plus TM.

[0083] Alternatively, according to WO06/059093, the TM component of the fusion protein is located towards the middle of the linear fusion protein sequence, between the protease cleavage site and the translocation component. This ensures that the TM is attached to the translocation domain (ie. as occurs with native clostridial holotoxin), though in this case the two components are reversed in order vis-à-vis native holotoxin. Subsequent cleavage at the protease cleavage site exposes the N-terminal portion of the TM, and provides the di-chain polypeptide fusion protein.

[0084] The above-mentioned protease cleavage sequence(s) may be introduced (and/or any inherent cleavage sequence removed) at the DNA level by conventional means, such as by site-directed mutagenesis. Screening to confirm the presence of cleavage sequences may be performed manually or with the assistance of computer software (e.g. the MapDraw program by DNASTAR, Inc.). Whilst any protease cleavage site may be employed (ie. clostridial, or non-clostridial), the following are preferred:

(SEQ ID NO: 100)

Enterokinase (DDDDK↓)

(SEQ ID NO: 101/102)

Factor Xa (IEGR↓/IDGR↓)

(SEQ ID NO: 103)

TEV(Tobacco Etch virus) (ENLYFQ↓G)

(SEQ ID NO: 104)

Thrombin (LVPR↓GS)

(SEQ ID NO: 105)

PreScission (LEVLFO↓GP)

[0085] Additional protease cleavage sites include recognition sequences that are cleaved by a non-cytotoxic protease, for example by a clostridial neurotoxin. These include the SNARE (eg. SNAP-25, syntaxin, VAMP) protein recognition sequences that are cleaved by non-cytotoxic proteases such as clostridial neurotoxins. Particular examples are provided in US2007/0166332, which is hereby incorporated in its entirety by reference thereto.

[0086] Also embraced by the term protease cleavage site is an intein, which is a self-cleaving sequence. The self-splicing reaction is controllable, for example by varying the concentration of reducing agent present. The above-mentioned ‘activation’ cleavage sites may also be employed as a ‘destructive’ cleavage site (discussed below) should one be incorporated into a polypeptide of the present invention.

[0087] In a preferred embodiment, the fusion protein of the present invention may comprise one or more N-terminal and/or C-terminal located purification tags. Whilst any purification tag may be employed, the following are preferred:
[0088] His-tag (e.g. 6× histidine), preferably as a C-terminal and/or N-terminal tag
[0089] MBP-tag (maltose binding protein), preferably as an N-terminal tag
[0090] GST-tag (glutathione-S-transferase), preferably as an N-terminal tag
[0091] His-MBP-tag, preferably as an N-terminal tag
[0092] GST-MBP-tag, preferably as an N-terminal tag
[0093] Thioredoxin-tag, preferably as an N-terminal tag
[0094] CBD-tag (Chitin Binding Domain), preferably as an N-terminal tag.

[0095] One or more peptide spacer/linker molecules may be included in the fusion protein. For example, a peptide spacer may be employed between a purification tag and the rest of the fusion protein molecule.

[0096] Thus, a third aspect of the present invention provides a nucleic acid (e.g. DNA) sequence encoding a polypeptide as described above (i.e. the second aspect of the present invention).

[0097] Said nucleic acid may be included in the form of a vector, such as a plasmid, which may optionally include one or more of an origin of replication, a nucleic acid integration site, a promoter, a terminator, and a ribosome binding site.

[0098] The present invention also includes a method for expressing the above-described nucleic acid sequence (i.e. the third aspect of the present invention) in a host cell, in particular in E. coli or via a baculovirus expression system.

[0099] The present invention also includes a method for activating a polypeptide of the present invention, said method comprising contacting the polypeptide with a protease that cleaves the polypeptide at a recognition site (cleavage site) located between the non-cytotoxic protease component and the translocation component, thereby converting the polypeptide into a di-chain polypeptide wherein the non-cytotoxic protease and translocation components are joined together by a disulphide bond. In a preferred embodiment, the recognition site is not native to a naturally-occurring clostridial neurotoxin and/or to a naturally-occurring IgA protease.

[0100] The polypeptides of the present invention may be further modified to reduce or prevent unwanted side-effects associated with dispersal into non-targeted areas. According to this embodiment, the polypeptide comprises a destructive cleavage site. The destructive cleavage site is distinct from the ‘activation’ site (i.e. di-chain formation), and is cleavable by a second protease and not by the non-cytotoxic protease. Moreover, when so cleaved at the destructive cleavage site by the second protease, the polypeptide has reduced potency (e.g. reduced binding ability to the intended target cell, reduced translocation activity and/or reduced non-cytotoxic protease activity). For completeness, any of the ‘destructive’ cleavage sites of the present invention may be separately employed as an ‘activation’ site in a polypeptide of the present invention.

[0101] Thus, according to this embodiment, the present invention provides a polypeptide that can be controllably inactivated and/or destroyed at an off-site location.

[0102] In a preferred embodiment, the destructive cleavage site is recognised and cleaved by a second protease (i.e. a destructive protease) selected from a circulating protease (e.g. an extracellular protease, such as a serum protease or a protease of the blood clotting cascade), a tissue-associated protease (e.g. a matrix metalloprotease (MMP), such as an MMP of muscle), and an intracellular protease (preferably a protease that is absent from the target cell).

[0103] Thus, in use, should a polypeptide of the present invention become dispersed away from its intended target cell and/or be taken up by a non-target cell, the polypeptide will become inactivated by cleavage of the destructive cleavage site (by the second protease).

[0104] In one embodiment, the destructive cleavage site is recognised and cleaved by a second protease that is present within an off-site cell-type. In this embodiment, the off-site cell and the target cell are preferably different cell types. Alternatively (or in addition), the destructive cleavage site is recognised and cleaved by a second protease that is present at an off-site location (e.g. distal to the target cell). Accordingly, when destructive cleavage occurs extracellularly, the target cell and the off-site cell may be either the same or different cell-types. In this regard, the target cell and the off-site cell may each possess a receptor to which the same polypeptide of the invention binds.

[0105] The destructive cleavage site of the present invention provides for inactivation/destruction of the polypeptide when the polypeptide is in or at an off-site location. In this regard, cleavage at the destructive cleavage site minimises the potency of the polypeptide (when compared with an identical polypeptide lacking the same destructive cleavage site, or possessing the same destructive site but in an uncleaved form). By way of example, reduced potency includes: reduced binding (to a mammalian cell receptor) and/or reduced translocation (across the endosomal membrane of a mammalian cell in the direction of the cytosol), and/or reduced SNARE protein cleavage.

[0106] When selecting destructive cleavage site(s) in the context of the present invention, it is preferred that the destructive cleavage site(s) are not substrates for any proteases that may be separately used for post-translational modification of the polypeptide of the present invention as part of its manufacturing process. In this regard, the non-cytotoxic proteases of the present invention typically employ a protease activation event (via a separate ‘activation’ protease cleavage site, which is structurally distinct from the destructive cleavage site of the present invention). The purpose of the activation cleavage site is to cleave a peptide bond between the non-cytotoxic protease and the translocation or the binding components of the polypeptide of the present invention, thereby providing an ‘activated’ di-chain polypeptide wherein said two components are linked together via a disulphide bond.

[0107] Thus, to help ensure that the destructive cleavage site(s) of the polypeptides of the present invention do not adversely affect the ‘activation’ cleavage site and subsequent disulphide bond formation, the former are preferably introduced into polypeptide of the present invention at a position of at least 20, at least 30, at least 40, at least 50, and more preferably at least 60, at least 70, at least 80 (contiguous) amino acid residues away from the ‘activation’ cleavage site.

[0108] The destructive cleavage site(s) and the activation cleavage site are preferably exogenous (i.e. engineered/artificial) with regard to the native components of the polypeptide. In other words, said cleavage sites are preferably not inherent to the corresponding native components of the polypeptide. By way of example, a protease or translocation component based on BoNT/A L-chain or H-chain (respectively) may be engineered according to the present invention to include a cleavage site. Said cleavage site would not, however, be present in the corresponding BoNT native L-chain or H-chain. Similarly, when the Targeting Moiety component of the polypeptide is engineered to include a protease cleavage site, said cleavage site would not be present in the corresponding native sequence of the corresponding Targeting Moiety.

[0109] In a preferred embodiment of the present invention, the destructive cleavage site(s) and the ‘activation’ cleavage site are not cleaved by the same protease. In one embodiment, the two cleavage sites differ from one another in that at least one, more preferably at least two, particularly preferably at least three, and most preferably at least four of the tolerated amino acids within the respective recognition sequences is/are different.

[0110] By way of example, in the case of a polypeptide chimera containing a Factor Xa ‘activation’ site between clostridial L-chain and H_{N} components, it is preferred to employ a destructive cleavage site that is a site other than a Factor Xa site, which may be inserted elsewhere in the L-chain and/or H_{N} and/or TM component(s). In this scenario, the polypeptide may be modified to accommodate an alternative ‘activation’ site between the L-chain and H_{N} components (for example, an enterokinase cleavage site), in which case a separate Factor Xa cleavage site may be incorporated elsewhere into the polypeptide as the destructive cleavage site. Alternatively, the existing Factor Xa ‘activation’ site between the L-chain and H_{N} components may be retained, and an alternative cleavage site such as a thrombin cleavage site incorporated as the destructive cleavage site.

[0111] When identifying suitable sites within the primary sequence of any of the components of the present invention for inclusion of cleavage site(s), it is preferable to select a primary sequence that closely matches with the proposed cleavage site that is to be inserted. By doing so, minimal structural changes are introduced into the polypeptide. By way of example, cleavage sites typically comprise at least 3 contiguous amino acid residues. Thus, in a preferred embodiment, a cleavage site is selected that already possesses (in the correct position(s)) at least one, preferably at least two of the amino acid residues that are required in order to introduce the new cleavage site. By way of example, in one embodiment, the Caspase 3 cleavage site (DMQD) SEQ ID NO: 106 may be introduced. In this regard, a preferred insertion position is identified that already includes a primary sequence selected from, for example, Dxxx, xMxx, xxQx, xxxD, DMxx, DxQx, DxxD, xMQx, xMxD, xxQD, DMQx, xMQD, DxQD, and DMxD.

[0112] Similarly, it is preferred to introduce the cleavage sites into surface exposed regions. Within surface exposed regions, existing loop regions are preferred.

[0113] In a preferred embodiment of the present invention, the destructive cleavage site(s) are introduced at one or more of the following position(s), which are based on the primary amino acid sequence of BoNT/A. Whilst the insertion positions are identified (for convenience) by reference to BoNT/A, the primary amino acid sequences of alternative protease domains and/or translocation domains may be readily aligned with said BoNT/A positions.

[0114] For the protease component, one or more of the following positions is preferred: 27-31, 56-63, 73-75, 78-81, 99-105, 120-124, 137-144, 161-165, 169-173, 187-194, 202-214, 237-241, 243-250, 300-304, 323-335, 375-382, 391-400, and 413-423. The above numbering preferably starts from the N-terminus of the protease component of the present invention.

[0115] In a preferred embodiment, the destructive cleavage site(s) are located at a position greater than 8 amino acid residues, preferably greater than 10 amino acid residues, more preferably greater than 25 amino acid residues, particularly preferably greater than 50 amino acid residues from the N-terminus of the protease component. Similarly, in a preferred embodiment, the destructive cleavage site(s) are located at a position greater than 20 amino acid residues, preferably greater than 30 amino acid residues, more preferably greater than 40 amino acid residues, particularly preferably greater than 50 amino acid residues from the C-terminus of the protease component.

[0116] For the translocation component, one or more of the following positions is preferred: 474-479, 483-495, 507-543, 557-567, 576-580, 618-631, 643-650, 669-677, 751-767, 823-834, 845-859. The above numbering preferably acknowledges a starting position of 449 for the N-terminus of the translocation domain component of the present invention, and an ending position of 871 for the C-terminus of the translocation domain component.

[0117] In a preferred embodiment, the destructive cleavage site(s) are located at a position greater than 10 amino acid residues, preferably greater than 25 amino acid residues, more preferably greater than 40 amino acid residues, particularly preferably greater than 50 amino acid residues from the N-terminus of the translocation component. Similarly, in a preferred embodiment, the destructive cleavage site(s) are located at a position greater than 10 amino acid residues, preferably greater than 25 amino acid residues, more preferably greater than 40 amino acid residues, particularly preferably greater than 50 amino acid residues from the C-terminus of the translocation component.

[0118] In a preferred embodiment, the destructive cleavage site(s) are located at a position greater than 10 amino acid residues, preferably greater than 25 amino acid residues, more preferably greater than 40 amino acid residues, particularly preferably greater than 50 amino acid residues from the N-terminus of the TM component. Similarly, in a preferred embodiment, the destructive cleavage site(s) are located at a position greater than 10 amino acid residues, preferably greater than 25 amino acid residues, more preferably greater than 40 amino acid residues, particularly preferably greater than 50 amino acid residues from the C-terminus of the TM component.

[0119] The polypeptide of the present invention may include one or more (e.g. two, three, four, five or more) destructive protease cleavage sites. Where more than one destructive cleavage site is included, each cleavage site may be the same or different. In this regard, use of more than one destructive cleavage site provides improved off-site inactivation. Similarly, use of two or more different destructive cleavage sites provides additional design flexibility.

[0120] The destructive cleavage site(s) may be engineered into any of the following component(s) of the polypeptide: the non-cytotoxic protease component; the translocation component; the Targeting Moiety; or the spacer peptide (if present). In this regard, the destructive cleavage site(s) are chosen to ensure minimal adverse effect on the potency of the polypeptide (for example by having minimal effect on the targeting/binding regions and/or translocation domain, and/or on the non-cytotoxic protease domain) whilst ensuring that the polypeptide is labile away from its target site/target cell.

[0121] Preferred destructive cleavage sites (plus the corresponding second proteases) are listed in the Table immediately below. The listed cleavage sites are purely illustrative and are not intended to be limiting to the present invention.

| | Destructive | | | | | | | |
|---|---|---|---|---|---|---|---|---|
| | cleavage site | Tolerated recognition sequence variance | | | | | | |
| Second | recognition | P4-P3-P2-P1-▾-P1′-P2′-P3′ | | | | | | |
| protease | sequence | P4 | P3 | P2 | P1 | P1′ | P2′ | P3′ |
| Thrombin | LVPR▾GS | A, F, G, I, | A, F, G, | P | R | Not D | Not D | — |
| | (SEQ ID NO: 104) | L, T, V | I, L, T, | | | or E | or E | |
| | | or M | V, W | | | | | |
| | | | or A | | | | | |
| Thrombin | GR▾G | | | G | R | G | | |
| Factor Xa | IEGR▾ | A, F, G, I, | D or E | G | R | — | — | — |
| | (SEQ ID NO: 101) | L, T, V | | | | | | |
| | | or M | | | | | | |
| ADAM17 | PLAQA▾VRSSS | | | | | | | |
| | (SEQ ID NO: 107) | | | | | | | |
| Human | SKGR▾SLIGRV | | | | | | | |
| airway | (SEQ ID NO: 108) | | | | | | | |
| trypsin-like | | | | | | | | |
| protease | | | | | | | | |
| (HAT) | | | | | | | | |
| ACE | | — | — | — | — | Not P | Not D | N/A |
| (peptidyl- | | | | | | | or E | |
| dipeptidase | | | | | | | | |
| A) | | | | | | | | |
| Elastase | MEA▾VTY | M, R | E | A, H | V, T | V, T, H | Y | — |
| (leukocyte) | (SEQ ID NO: 109) | | | | | | | |
| Furin | RXR/KR▾ | R | X | R | R | | | |
| | (SEQ ID NO: 110) | | | or K | | | | |
| Granzyme | IEPD▾ | I | E | P | D | — | — | — |
| | (SEQ ID NO: 111) | | | | | | | |
| Caspase 1 | | F, W, Y, L | — | H, | D | Not | — | — |
| | | | | A, T | | P, E. D. | | |
| | | | | | | Q. K or R | | |
| Caspase 2 | DVAD▾ | D | V | A | D | Not | — | — |
| | (SEQ ID NO: 112) | | | | | P, E. D. | | |
| | | | | | | Q. K or R | | |
| Caspase 3 | DMQD▾ | D | M | Q | D | Not | — | — |
| | (SEQ ID NO: 106) | | | | | P, E. D. | | |
| | | | | | | Q. K or R | | |
| Caspase 4 | LEVD▾ | L | E | V | D | Not | — | — |
| | (SEQ ID NO: 113) | | | | | P, E. D. | | |
| | | | | | | Q. K or R | | |
| Caspase 5 | | L or W | E | H | D | — | — | — |
| Caspase 6 | | V | E | H | D | Not | — | — |
| | | | | or I | | P, E. D. | | |
| | | | | | | Q. K or R | | |
| Caspase 7 | DEVD▾ | D | E | V | D | Not | — | — |
| | (SEQ ID NO: 114) | | | | | P, E. D. | | |
| | | | | | | Q. K or R | | |
| Caspase 8 | | I or L | E | T | D | Not | — | — |
| | | | | | | P, E. D. | | |
| | | | | | | Q. K or R | | |
| Caspase 9 | LEHD▾ | L | E | H | D | — | — | — |
| | (SEQ ID NO: 115) | | | | | | | |
| Caspase | IEHD▾ | I | E | H | D | — | — | — |
| 10 | (SEQ ID NO: 116) | | | | | | | |

[0122] Matrix metalloproteases (MMPs) are a preferred group of destructive proteases in the context of the present invention. Within this group, ADAM17 (EC 3.4.24.86, also known as TACE), is preferred and cleaves a variety of membrane-anchored, cell-surface proteins to “shed” the extracellular domains. Additional, preferred MMPs include adamalysins, serralysins, and astacins.

[0123] Another group of preferred destructive proteases is a mammalian blood protease, such as Thrombin, Coagulation Factor VIIa, Coagulation Factor IXa, Coagulation Factor Xa, Coagulation Factor XIa, Coagulation Factor XIIa, Kallikrein, Protein C, and MBP-associated serine protease.

[0124] In one embodiment of the present invention, said destructive cleavage site comprises a recognition sequence having at least 3 or 4, preferably 5 or 6, more preferably 6 or 7, and particularly preferably at least 8 contiguous amino acid residues. In this regard, the longer (in terms of contiguous amino acid residues) the recognition sequence, the less likely non-specific cleavage of the destructive site will occur via an unintended second protease.

[0125] It is preferred that the destructive cleavage site of the present invention is introduced into the protease component and/or the Targeting Moiety and/or into the translocation component and/or into the spacer peptide. Of these four components, the protease component is preferred. Accordingly, the polypeptide may be rapidly inactivated by direct destruction of the non-cytotoxic protease and/or binding and/or translocation components.

### Polypeptide Delivery

[0126] In use, the present invention employs a pharmaceutical composition, comprising a polypeptide, together with at least one component selected from a pharmaceutically acceptable carrier, excipient, adjuvant, propellant and/or salt.

[0127] The polypeptides of the present invention may be formulated for oral, parenteral, continuous infusion, inhalation or topical application. Compositions suitable for injection may be in the form of solutions, suspensions or emulsions, or dry powders which are dissolved or suspended in a suitable vehicle prior to use.

[0128] Local delivery means may include an aerosol, or other spray (eg. a nebuliser). In this regard, an aerosol formulation of a polypeptide enables delivery to the lungs and/or other nasal and/or bronchial or airway passages.

[0129] The preferred route of administration is selected from: systemic (eg. iv), laparoscopic and/or localised injection (transphenoidal injection directly into the pituitary).

[0130] In the case of formulations for injection, it is optional to include a pharmaceutically active substance to assist retention at or reduce removal of the polypeptide from the site of administration. One example of such a pharmaceutically active substance is a vasoconstrictor such as adrenaline. Such a formulation confers the advantage of increasing the residence time of polypeptide following administration and thus increasing and/or enhancing its effect.

[0131] The dosage ranges for administration of the polypeptides of the present invention are those to produce the desired therapeutic effect. It will be appreciated that the dosage range required depends on the precise nature of the polypeptide or composition, the route of administration, the nature of the formulation, the age of the patient, the nature, extent or severity of the patient's condition, contraindications, if any, and the judgement of the attending physician. Variations in these dosage levels can be adjusted using standard empirical routines for optimisation.

[0132] Suitable daily dosages (per kg weight of patient) are in the range 0.0001-1 mg/kg, preferably 0.0001-0.5 mg/kg, more preferably 0.002-0.5 mg/kg, and particularly preferably 0.004-0.5 mg/kg. The unit dosage can vary from less that 1 microgram to 30 mg, but typically will be in the region of 0.01 to 1 mg per dose, which may be administered daily or preferably less frequently, such as weekly or six monthly.

[0133] A particularly preferred dosing regimen is based on 2.5 ng of polypeptide as the 1× dose. In this regard, preferred dosages are in the range 1×-100× (i.e. 2.5-250 ng).

[0134] Fluid dosage forms are typically prepared utilising the polypeptide and a pyrogen-free sterile vehicle. The polypeptide, depending on the vehicle and concentration used, can be either dissolved or suspended in the vehicle. In preparing solutions the polypeptide can be dissolved in the vehicle, the solution being made isotonic if necessary by addition of sodium chloride and sterilised by filtration through a sterile filter using aseptic techniques before filling into suitable sterile vials or ampoules and sealing. Alternatively, if solution stability is adequate, the solution in its sealed containers may be sterilised by autoclaving. Advantageously additives such as buffering, solubilising, stabilising, preservative or bactericidal, suspending or emulsifying agents and or local anaesthetic agents may be dissolved in the vehicle.

[0135] Dry powders, which are dissolved or suspended in a suitable vehicle prior to use, may be prepared by filling pre-sterilised ingredients into a sterile container using aseptic technique in a sterile area. Alternatively the ingredients may be dissolved into suitable containers using aseptic technique in a sterile area. The product is then freeze dried and the containers are sealed aseptically.

[0136] Parenteral suspensions, suitable for intramuscular, subcutaneous or intradermal injection, are prepared in substantially the same manner, except that the sterile components are suspended in the sterile vehicle, instead of being dissolved and sterilisation cannot be accomplished by filtration. The components may be isolated in a sterile state or alternatively it may be sterilised after isolation, e.g. by gamma irradiation.

[0137] Advantageously, a suspending agent for example polyvinylpyrrolidone is included in the composition/s to facilitate uniform distribution of the components.

### DEFINITIONS SECTION

[0138] Targeting Moiety (TM) means any chemical structure that functionally interacts with a Binding Site to cause a physical association between the polypeptide of the invention and the surface of a target cell (typically a mammalian cell, especially a human cell). The term TM embraces any molecule (ie. a naturally occurring molecule, or a chemically/physically modified variant thereof) that is capable of binding to a Binding Site on the target cell, which Binding Site is capable of internalisation (eg. endosome formation)—also referred to as receptor-mediated endocytosis. The TM may possess an endosomal membrane translocation function, in which case separate TM and Translocation Domain components need not be present in an agent of the present invention. Throughout the preceding description, specific TMs have been described. Reference to said TMs is merely exemplary, and the present invention embraces all variants and derivatives thereof, which possess a binding (i.e. targeting) ability to a Binding Site on a growth hormone-releasing cell, wherein the Binding Site is capable of internalisation.

[0139] The TM of the present invention binds (preferably specifically binds) to the target cell in question. The term “specifically binds” preferably means that a given TM binds to the target cell with a binding affinity (Ka) of 10⁶ M⁻¹ or greater, for example 10⁷ M⁻¹ or greater, 10⁸ M⁻¹ or greater, or 10⁹ M⁻¹ or greater.

[0140] Reference to TM in the present specification embraces fragments and variants thereof, which retain the ability to bind to the target cell in question. By way of example, a variant may have at least 80%, preferably at least 90%, more preferably at least 95%, and most preferably at least 97 or at least 99% amino acid sequence homology with the reference TM. Thus, a variant may include one or more analogues of an amino acid (e.g. an unnatural amino acid), or a substituted linkage. Also, by way of example, the term fragment, when used in relation to a TM, means a peptide having at least ten, preferably at least twenty, more preferably at least thirty, and most preferably at least forty amino acid residues of the reference TM. The term fragment also relates to the above-mentioned variants. Thus, by way of example, a fragment of the present invention may comprise a peptide sequence having at least 10, 20, 30 or 40 amino acids, wherein the peptide sequence has at least 80% sequence homology over a corresponding peptide sequence (of contiguous) amino acids of the reference peptide.

[0141] By way of example, ErbB peptide TMs may be modified to generate mutein ErbB ligands with altered properties such as increased stability. By way of example, ErbB TM muteins include ErbB peptides having amino acid modifications such as a valine residue at position 46 or 47 (EGFVal46 or 47), which confers stability to cellular proteases. ErbB TMs may also have amino acids deleted or additional amino acids inserted. This includes but is not limited to EGF having a deletion of the two C-terminal amino acids and a neutral amino acid substitution at position 51 (particularly EGF51Gln51; see US20020098178A1), and EGF with amino acids deleted (e.g. rEGF2-48; rEGF3-48 and rEGF4-48). Fragments of ErbB TMs may include fragments of TGFα which contain predicted β-turn regions (e.g. a peptide of the sequence Ac-C-H-S-G-Y-V-G-A-R-C-O-OMe) (SEQ ID NO: 118), fragments of EGF such as [Ala20]EGF(14-31), and the peptide YHWYGYTPQNVI (SEQ ID NO: 119) or GE11. All of the above patent specifications are incorporated herein by reference thereto.

[0142] By way of further example, somatostatin (SST) and cortistatin (CST) have high structural homology, and bind to all known SST receptors. Full-length SST has the amino acid sequence:

(SEQ ID NO: 120)

MLSCRLQCALAALSIVLALGCVTGAPSDPRLRQFLQKSLAAAAGKQELAK
YFLAELLSEPNQTENDALEPEDLSQAAEQDEMRLELQRSANSNPAMAPRE
RKAGCKNFFWKTFTSC

[0143] Full-length CST has the amino acid sequence:

(SEQ ID NO: 121)

MYRHKNSWRLGLKYPPSSKEETQVPKTLISGLPGRKSSSRVGEKLQSAH
KMPLSPGLLLLLLSGATATAALPLEGGPTGRDSEHMQEAAGIRKSSLLT
FLAWWFEWTSQASAGPLIGEEAREVARRQEGAPPQQSARRDRMPCRNFF
WKTFSSCK

[0144] Reference to these TMs includes the following fragments (and corresponding variants) thereof:

(SEQ ID NO: 122)

NFFWKTF;

(SEQ ID NO: 123)

(R or K)NFFWKTF;

(SEQ ID NO: 124)

C(R or K)NFFWKTF;

(SEQ ID NO: 125)

(P or G)C(R or K)NFFWKTF;

(SEQ ID NO: 126)

NFFWKTF(S or T);

(SEQ ID NO: 127)

NFFWKTF(S or T)S;

(SEQ ID NO: 128)

NFFWKTF(S or T)SC;

(SEQ ID NO: 129)

(R or K)NFFWKTF(S or T);

(SEQ ID NO: 130)

(R or K)NFFWKTF(S or T)S;

(SEQ ID NO: 131)

(R or K)NFFWKTF(S or T)SC;

(SEQ ID NO: 132)

C(R or K)NFFWKTF(S or T);

(SEQ ID NO: 133)

C(R or K)NFFWKTF(S or T)S;

(SEQ ID NO: 134)

C(R or K)NFFWKTF(S or T)SC;

(SEQ ID NO: 135)

(P or G)C(R or K)NFFWKTF(S or T);

(SEQ ID NO: 136)

(P or G)C(R or K)NFFWKTF(S or T)S;or

(SEQ ID NO: 137)

(P or G)C(R or K)NFFWKTF(S or T)SC.

[0145] With regard to the above sequences, where a (P or G) alternative is given, a P is preferred in the case of a CST TM, whereas a G is preferred in the case of an SST TM. Where an (R or K) alternative is given, an R is preferred in the case of a CST TM, whereas a K is preferred in the case of an SST TM. Where an (S or T) alternative is given, an S is preferred in the case of a CST TM, whereas a T is preferred in the case of an SST TM.

[0146] Preferred fragments comprise at least 7 or at least 10 amino acid residues, preferably at least 14 or at least 17 amino acid residues, and more preferably at least 28 or 29 amino acid residues. By way of example, preferred sequences include:

(SEQ ID NO: 138)

SANSNPAMAPRERKAGCKNFFWKTFTSC (SST-28);

(SEQ ID NO: 139)

AGCKNFFWKTFTSC (SST-14);

(SEQ ID NO: 140)

QEGAPPQQSARRDRMPCRNFFWKTFSSCK (CST-29);

(SEQ ID NO: 141)

QERPPLQQPPHRDKKPCKNFFWKTFSSCK (CST-29);

(SEQ ID NO: 142)

QERPPPQQPPHLDKKPCKNFFWKTFSSCK (CST-29)

(SEQ ID NO: 143)

DRMPCRNFFWKTFSSCK (CST-17);

(SEQ ID NO: 144)

PCRNFFWKTFSSCK (CST-14);
and

(SEQ ID NO: 145)

PCKNFFWKTFSSCK (CST-14)

[0147] The TM may comprise a longer amino acid sequence, for example, at least 30 or 35 amino acid residues, or at least 40 or 45 amino acid residues, so long as the TM is able to bind to a normal GH-secreting cell, preferably to an SST or to a CST receptor on a normal GH-secreting cell. In this regard, the TM is preferably a fragment of full-length SST or CST, though including at least the core sequence “NFFWKTF” or one of the above-defined primary amino acid sequences.

[0148] By way of further example, GHRH peptides of the present invention include:

(SEQ ID NO: 146)

YADAIFTASYRKVLGQLSARKLLQDILSR;

(SEQ ID NO: 147)

YADAIFTASYRNVLGQLSARKLLQDILSR;

(SEQ ID NO: 148)

YADAIFTNSYRKVLGQLSARKLLQDIM;

(SEQ ID NO: 149)

YADAIFTNSYRKVLGQLSARKLLQDIMS;

(SEQ ID NO: 150)

ADAIFTNSYRKVLGQLSARKLLQDIMSR;

(SEQ ID NO: 151)

YADAIFTNSYRKVLGQLSARKLLQDIMSRQQGESNQERGARARL;

(SEQ ID NO: 152)

YADAIFTNSYRKVLGQLSARKLLQDIMSRQQGESNQERGA;

(SEQ ID NO: 153)

YADAIFTNAYRKVLGQLSARKLLQDIMSR;

(SEQ ID NO: 154)

YADAIFTNSYRKVLGQLSARKALQDIMSR;

(SEQ ID NO: 155)

YADAIFTASYKKVLGQLSARKLLQDIMSR;

(SEQ ID NO: 156)

YADAIFTASYKRVLGQLSARKLLQDIMSR;

(SEQ ID NO: 157)

YADAIFTASYNKVLGQLSARKLLQDIMSR;

(SEQ ID NO: 158)

YADAIFTASYRKVLGQLSAKKLLQDIMSR;

(SEQ ID NO: 159)

YADAIFTASYKKVLGQLSAKKLLQDIMSR;

(SEQ ID NO: 160)

YADAIFTASYRKVLGQLSANKLLQDIMSR;

(SEQ ID NO: 161)

YADAIFTASYRNVLGQLSARKLLQDIMSR;

(SEQ ID NO: 162)

YADAIFTASYRKVLGQLSARNLLQDIMSR;

(SEQ ID NO: 163)

YADAIFEASYRKVLGQLSARKLLQDIMSR;

(SEQ ID NO: 164)

YADAIFTASERKVLGQLSARKLLQDIMSR;

(SEQ ID NO: 165)

YADAIFTASYRKELGQLSARKLLQDIMSR;

(SEQ ID NO: 166)

YADAIFTASYRKVLGQLSARKLLQDIMSR;

(SEQ ID NO: 167)

YADAIFTESYRKVLGQLSARKLLQDIMSR;

(SEQ ID NO: 168)

YADAIFTNSYRKVLAQLSARKLLQDIM;

(SEQ ID NO: 169)

YADAIFTNSYRKVLAQLSARKLLQDIMSR;

(SEQ ID NO: 174)

YADAIFTASYRKVLAQLSARKLLQDIMSR;

(SEQ ID NO: 175)

YADAIFTAAYRKVLAQLSARKALQDIASR;

(SEQ ID NO: 176)

YADAIFTAAYRKVLAQLSARKALQDIMSR;

(SEQ ID NO: 177)

HVDAIFTQSYRKVLAQLSARKLLQDILNRQQGERNQEQGA;

(SEQ ID NO: 178)

HVDAIFTQSYRKVLAQLSARKALQDILSRQQG;

(SEQ ID NO: 179)

HVDAIFTSSYRKVLAQLSARKLLQDILSR;

(SEQ ID NO: 180)

HVDAIFTTSYRKVLAQLSARKLLQDILSR;

(SEQ ID NO: 181)

YADAIFTQSYRKVLAQLSARKALQDILNR;

(SEQ ID NO: 182)

YADAIFTQSYRKVLAQLSARKALQDILSR.

[0149] It is routine to confirm that a TM binds to the selected target cell. For example, a simple radioactive displacement experiment may be employed in which tissue or cells representative of a growth hormone-secreting cell are exposed to labelled (eg. tritiated) TM in the presence of an excess of unlabelled TM. In such an experiment, the relative proportions of non-specific and specific binding may be assessed, thereby allowing confirmation that the TM binds to the target cell. Optionally, the assay may include one or more binding antagonists, and the assay may further comprise observing a loss of TM binding. Examples of this type of experiment can be found in Hulme, E. G. (1990), Receptor-binding studies, a brief outline, pp. 303-311, In Receptor biochemistry, A Practical Approach, Ed. E. G. Hulme, Oxford University Press.

[0150] In the context of the present invention, reference to a peptide TM (e.g. GHRH peptide, or leptin peptide) embraces peptide analogues thereof, so long as the analogue binds to the same receptor as the corresponding ‘reference’ TM. Said analogues may include synthetic residues such as:
[0151] β-Nal=β-naphthylalanine
[0152] β-Pal=β-pyridylalanine
[0153] hArg(Bu)=N-guanidino-(butyl)-homoarginine
[0154] hArg(Et)=N,N′-guanidino-(dimethyl)-homoarginine
[0155] hArg(CH₂CF₃)₂=N,N′-guanidino-bis-(2,2,2,-trifluoroethyl)-homoarginine
[0156] hArg(CH₃, hexyl)=N,N′-guanidino-(methyl, hexyl)-homoarginine
[0157] Lys(Me)=N^{e}-methyllysine
[0158] Lys(iPr)=N^{e}-isopropyllysine
[0159] AmPhe=aminomethylphenylalanine
[0160] AChxAla=aminocyclohexylalanine
[0161] Abu=α-aminobutyric acid
[0162] Tpo=4-thiaproline
[0163] MeLeu=N-methylleucine
[0164] Orn=ornithine
[0165] Nle=norleucine
[0166] Nva=norvaline
[0167] Trp(Br)=5-bromo-tryptophan
[0168] Trp(F)=5-fluoro-tryptophan
[0169] Trp(N0₂)=5-nitro-tryptophan
[0170] Gaba=γ-aminobutyric acid
[0171] Bmp=J-mercaptopropionyl
[0172] Ac=acetyl
[0173] Pen-pencillamine

[0174] By way of example, the above peptide analogue aspect is described in more detail with reference to specific peptide TMs, such as SST peptides, GHRH peptides, bombesin peptides, ghrelin peptides, and urotensin peptides, though the same principle applies to all TMs of the present invention.

[0175] Somatostatin analogues, which can be used to practice the present invention include, but are not limited to, those described in the following publications, which are hereby incorporated by reference: Van Binst, G. et al. Peptide Research 5: 8 (1992); Horvath, A. et al. Abstract, “Conformations of Somatostatin Analogs Having Antitumor Activity”, 22nd European peptide Symposium, Sep. 13-19,1992, Interlaken, Switzerland; U.S. Pat. No. 5,506,339; EP0363589; U.S. Pat. No. 4,904,642, U.S. Pat. No. 4,871,717; U.S. Pat. No. 4,725,577; U.S. Pat. No. 4,684,620; U.S. Pat. No. 4,650,787; U.S. Pat. No. 4,585,755; U.S. Pat. No. 4,725,577; U.S. Pat. No. 4,522,813; U.S. Pat. No. 4,369,179, U.S. Pat. No. 4,360,516; U.S. Pat. No. 4,328,214; U.S. Pat. No. 4,316,890; U.S. Pat. No. 4,310,518; U.S. Pat. No. 4,291,022; U.S. Pat. No. 4,238,481; U.S. Pat. No. 4,235,886; U.S. Pat. No. 4,211,693; U.S. Pat. No. 4,190,648; U.S. Pat. No. 4,146,612; U.S. Pat. No. 4,133,782; U.S. Pat. No. 5,506,339; U.S. Pat. No. 4,261,885; U.S. Pat. No. 4,282,143; U.S. Pat. No. 4,190,575; U.S. Pat. No. 5,552,520; EP0389180; EP0505680; U.S. Pat. No. 4,603,120; EP0030920; U.S. Pat. No. 4,853,371; WO90/12811; WO97/01579; WO91/18016; WO98/08529 and WO98/08528; WO/0075186 and WO00/06185; WO99/56769; and FR 2,522,655. Each of these publications is incorporated in its entirety by reference thereto.

[0176] Methods for synthesizing analogues are well documented, as illustrated, for example, by the patents cited above. For example, synthesis of H-D-Phe-Phe-Phe-D-Trp-Lys-Thr-Phe-Thr-NH2, can be achieved by following the protocol set forth in Example 1 of EP0395417A1. Similarly, synthesis analogues with a substituted N-terminus can be achieved, for example, by following the protocol set forth in WO88/02756, EP0329295, and U.S. Pat. No. 5,240,561.

[0177] The use of linear SST analogues are also included within the scope of this invention, for example: H-D-Phe-p-chloro-Phe-Tyr-D-Trp-Lys-Thr-Phe-Thr-NH2; H-D-Phe-p-N02-Phe-Tyr-D-Trp-Lys-Val-Phe-Thr-NH2; H-D-*Nal-p-chloro-Phe-Tyr-D-Trp-Lys-Val-Phe-Thr-NH2; H-D-Phe-Phe-Phe-D-Trp-Lys-Thr-Phe-Thr-NH2; H-D-Phe-Phe-Tyr-D-Trp-Lys-Val-Phe-Thr-NH2; H-D-Phe-p-chloro-Phe-Tyr-D-Trp-Lys-Val-Phe-Thr-NH2; and H-D-Phe-Ala-Tyr-D-Trp-Lys-Val-Ala-D-beta-Nal-NH2.

[0178] One or more chemical moieties, eg. a sugar derivative, mono or poly-hydroxy (C2-12) alkyl, mono or poly-hydroxy (C2-12) acyl groups, or a piperazine derivative, can be attached to a SST analogue, e.g. to the N-terminus amino acid—see WO88/02756, EP0329295, and U.S. Pat. No. 5,240,561.

[0179] GHRH peptide analogues date back to the 1990s, and include the ‘standard antogonist’ [Ac-Tyr′, D-Arg2jhGH-RH 0-29) Nha. U.S. Pat. No. 4,659,693 discloses GH-RH antagonistic analogs which contain certain N,N′-dialkykomega-guanidino alpha-amino acyl residues in position 2 of the GH-RH (1-29) sequence, Additional examples are provided in WO91/16923, U.S. Pat. No. 5,550,212, U.S. Pat. No. 5,942,489, U.S. Pat. No. 6,057,422 U.S. Pat. No. 5,942,489, U.S. Pat. No. 6,057,422, WO96/032126, WO96/022782, WO96/016707, WO94/011397, WO94/011396, each of which is herein incorporated by reference thereto.

[0180] Examples of bombesin analogues suitable for use in the present invention include TMs comprising: D-Phe-Gln-Trp-Ala-Val-Gly-His-Leu-Met-NH₂ (code named BIM-26218), D-Phe-Gln-Trp-Ala-Val-Gly-His-Leu-Leu-NH₂ (code named BIM-26187); D-Cps-Gln-Trp-Ala-Val-Gly-His-Leu-φ [CH₂NH]-Phe-NH₂ (code named BIM-26159), and D-Phe-Gln-Trp-Ala-Val-Gly-His-Leu-φ [CH₂NH]-Cpa-NH₂ (code named BIM-26189); D-Phe-Gln-Trp-Ala-Val-N-methyl-D-Ala-His-Leu-methylester, and D-F₉-Phe-Gln-Trp-Ala-Val-D-Ala-His-Leu-methylester.

[0181] Bombesin analogues include peptides derived from the naturally-occurring, structurally-related peptides, namely; bombesin, neuromedin B, neuromedin C, litorin, and GRP. The relevant amino acid sequences of these naturally occurring TM peptides are listed below:

Bombesin (last 10 aa's): Gly-Asn-Gln-Trp-Ala-Val-
Gly-His-Leu-Met-NH₂
Neuromedin B: Gly-Asn-Leu-Trp-Ala-Thr-Gly-His-Phe-
Met-NH₂
Neuromedin C: Gly-Asn-His-Trp-Ala-Val-Gly-His-Leu-
Met-NH₂
Litorin: pGlu-Gln-Trp-Ala-Val-Gly-His-Phe-Met-NH₂
Human GRP (last 10 aa's): Gly-Asn-His-Trp-Ala-Val-
Gly-His-Leu-Met-NH₂

[0182] Analogs suitable for use in the present invention are described in U.S. Pat. No. 502,438, filed Mar. 30, 1990, U.S. Pat. No. 397,169, filed Aug. 21, 1989, U.S. Pat. No. 376,555, filed Jul. 7, 1989, U.S. Pat. No. 394,727, filed Aug. 16, 1989; U.S. Pat. No. 317,941, filed Mar. 2, 1989, U.S. Pat. No. 282,328, filed Dec. 9, 1988, U.S. Pat. No. 257,998, filed Oct. 14, 1988, U.S. Pat. No. 248,771, filed Sep. 23, 1988; U.S. Pat. No. 207,759, filed Jun. 16, 1988, U.S. Pat. No. 204,171, filed Jun. 8, 1988, U.S. Pat. No. 173,311, filed Mar. 25, 1988, U.S. Pat. No. 100,571, filed Sep. 24, 1987; and U.S. Pat. No. 520,225, filed May 9, 1990, U.S. Pat. No. 440,039, filed Nov. 21, 1989. All these applications are hereby incorporated by reference. Bombesin analogs are also described in Zachary et al., Proc. Nat. Aca. Sci. 82:7616 (1985); Heimbrook et al., “Synthetic Peptides: Approaches to Biological Problems”, UCLA Symposium on Mol. and Cell. Biol. New Series, Vol. 86, ed. Tarn and Kaiser; Heinz-Erian et al., Am. J. Physiol. G439 (1986); Martinez et al., J. Med. Chem. 28:1874 (1985); Gargosky et al., Biochem. J. 247:427 (1987); Dubreuil et al. Drug Design and Delivery, Vol 2:49, Harwood Academic Publishers, GB (1987); Heikkila et al., J. Biol. Chem. 262:16456 (1987); Caranikas et al., J. Med. Chem. 25:1313 (1982); Saeed et al., Peptides 10:597 (1989); Rosell et al., Trends in Pharmacological Sciences 3:211 (1982); Lundberg et al., Proc. Nat, Aca. Sci, 80:1120, (1983); Engberg et al., Nature 293:222 (1984); Mizrahi et al., Euro. J. Pharma. 82:101 (1982); Leander et al., Nature 294:467 (1981); Woll et al., Biochem. Biophys. Res. Comm. 155:359 (1988); Rivier et al., Biochem. 17:1766 (1978); Cuttitta et al., Cancer Surveys 4:707 (1985); Aumelas et al., Int. J. Peptide Res. 30:596 (1987); all of which are also hereby incorporated by reference.

[0183] The analogs can be prepared by conventional techniques, such as those described in WO92/20363 and EP0737691. Additional bombesin analogues are described in, for example, WO89/02897, WO91/17181, WO90/03980 and WO91/02746, all of which are herein incorporated by reference thereto.

[0184] Examples of ghrelin analogues suitable for use as a TM of the present invention comprise: Tyr-DTrp-DLys-Trp-DPhe-NH₂, Tyr-DTrp-Lys-Trp-DPhe-NH₂, His-DTrp-DLys-Trp-DPhe-NH₂, His-DTrp-DLys-Phe-DTrp-NH₂, His-DTrp-DArg-Trp-DPhe-NH₂, His-DTrp-DLys-Trp-DPhe-Lys-NH₂, DesaminoTyr-DTrp-Ala-Trp-DPhe-NH₂, DesaminoTyr-DTrp-DLys-Trp-DPhe-NH₂. DeaminoTyr-DTrp-Ser-Trp-DPhe-Lys-NH₂, DesaminoTyr-DTrp-Ser-Trp-DPhe-NH₂, His-DTrp-DTrp-Phe-Met-NH₂, Tyr-DTrp-DTrp-Phe-Phe-NH₂, Glyψ[CH₂NH]-DβNal-Ala-Trp-DPhe-Lys-NH₂, Glyψ[CH2NH]-DbetaNal-DLyS-TrP-DPhe-Lys-NH₂, DAla-DbetaNal-DLys-DTrp-Phe-Lys-NH₂, His-DbetaNal-DLys-Trp-DPhe-Lys-NH₂, Ala-His-DTrp-DLys-Trp-DPhe-Lys-NH₂, Alaφ[CH₂NH]-DbetaNal-Ala-Trp-DPhe-Lys-NH₂, DbetaNal-Ala-Trp-DPhe-Ala-NH₂, DAla-DcyclohexylAla-Ala-Phe-DPhe-Nle-NH₂, DcyclohexylAla-Ala-Phe-DTrp-Lys-NH₂, DAla-DbetaAla-Thr-DThr-Lys-NH₂, DcyclohexylAla-Ala-Trp-DPhe-NH₂, DAla-DbetaNal-Ala-Ala-DAla-Lys-NH₂, DbetaNal-Ala-Trp-DPhe-Leu-NH₂, His-DTrp-Phe-Trp-DPhe-Lys-NH₂, DAla-DbetaNal-DAla-DTrp-Phe-Lys-NH₂, pAla-Trp-DAla-DTrp-Phe-NH₂, His-Trp-DAla-DTrp-Phe-LysNH₂, DLys-DβNal-Ala-Trp-DPhe-Lys-NH₂, DAla-DbetaNal-DLys-DTrp-Phe-Lys-NH₂, Tyr-DAla-Phe-Aib-NH₂, Tyr-DAla-Sar-NMePhe-NH₂, αγAbu-DTrp-DTrp-Ser-NH₂, αγAbu-DTrp-DTrp-Lys-NH₂, αγAbu-DTrp-DTrp-Orn-NH₂, aAbu-DTrp-DTrp-Orn-NH₂, DThr-D\acute{α}Nal-DTrp-DPro-Arg-NH₂, DAla-Ala-DAla-DTrp-Phe-Lys-NH₂, Alaψ[CH₂NH]His-DTrp-Ala-Trp-DPhe-Lys-NH₂, Lys-DHis-DTrp-Phe-NH₂, γAbu-DTrp-DTrp-Orn-NH₂, inip-Trp-Trp-Phe-NH₂, Ac-DTrp-Phe-DTrp-Leu-NH₂, Ac-DTrp-Phe-DTrp-Lys-NH₂, Ac-DTrp-DTrp-Lys-NH₂, DLys-Tyr-DTrp-DTrp-Phe-Lys-NH₂, Ac-DbetaNal-Leu-Pro-NH₂, pAla-Trp-DTrp-DTrp-Orn-NH₂, DVal-DαNal-DTrp-Phe-Arg-NH₂, DLeu-DαNal-DTrp-Phe-Arg-NH₂, CyclohexylAla-DαNal-DTrp-Phe-Arg-NH₂, DTp-DαNal-DTrp-Phe-Arg-NH₂, DAla-DβNal-DPro-Phe-Arg-NH₂, Ac-DαNal-DTrp-Phe-Arg-NH₂. DαNal-DTrp-Phe-Arg-NH₂, His-DTrp-DTrp-Lys-NH₂, Ac-DpNal-DTrp-NH₂, αAib-DTrp-DcyclohexylAla-NH₂, αAib-DTrp-DAla-cyclohexylAla-NH₂, DAla-DcyclohexylAla-Ala-Ala-Phe-DPhe-Nle-NH₂, DPhe-Ala-Phe-DPal-NH₂, DPhe-Ala-Phe-DPhe-Lys-NH₂, DLys-Tyr-DTrp-DTrp-Phe-NH₂, Ac-DLys-Tyr-DTrp-DTrp-Phe-NH₂, Arg-DTrp-Leu-Tyr-Trp-Pro(cyclic Arg-Pro), Ac-DβNal-PicLys-ILys-DPhe-NH2, DPal-Phe-DTrp-Phe-Met-NH₂, DPhe-Trp-DPhe-Phe-Met-NH₂, DPal-Trp-DPhe-Phe-Met-NH₂, pAla-Pal-DTrp-DTrp-Orn-NH₂, αγAbu-Trp-DTrp-DTrp-Orn-NH₂, βAla-Trp-DTrp-DTrp-Lys-NH₂, γAbu-Trp-DTrp-DTrp-Orn-NH₂, Ava-Trp-DTrp-DTrp-Orn-NH₂, DLys-Tyr-DTrp-Ala-Trp-DPhe-NH₂, His-DTrp-DArg-Trp-DPhe-NH₂, <Glu-His-Trp-DSer-DArg-NH₂, DPhe-DPhe-DTrp-Met-DLys-NH₂. 0-(2-methylallyl)benzophonone oxime, (R)-2-amino-3-(1H-1-indol-3-yl)-1-(4-phenylpiperidin-1-yl)propan-1-one, N-((R)-1-((R)-1-((S)-3-(1H-indol-3-yl)-1-oxo-1-(4-phenylpiperidin-1-yl)propan-2-ylamino)-6-amino-1-oxohexan-2-ylamino)-3-hydroxy-1-oxopropan-2-yl)benzamide, (S)-N-((S)-3-(1H-indol-3-yl)-1-oxo-1-(4-phenylpiperidin-1-yl)propan-2-yl)-6-acetamido-2-((S)-2-amino-3-(benzyloxy)propanamido)hexanamide, (S)-N-((R)-3-(1H-indol-3-yl)-1-oxo-1-(4-phenylpiperidin-1-yl)propan-2-yl)-2-((S)-2-acetamido-3-(benzyloxy)propanamido)-6-aminohexanamide, (R)-N-(3-(1H-indol-3-yl)-1-(4-(2-methoxyphenyl)piperidin-1-yl)-1-oxopropan-2-yl)-4-aminobutanamide, (R)-N-(3-(1H-indol-3-yl)-1-(4-(2-methoxyphenyl)piperidin-1-yl)-1-oxopropan-2-yl)-2-amino-2-methylpropanamide, methyl 3-(p-tolylcarbanoyl)-2-naphthoate, ethyl 3-(4-(2-methoxyphenyl)piperidine-1-carbonyl)-2-naphthoate, 3-(2-methoxyphenylcarbamoyl)-2-naphthoate, (S)-2,4-diamino-N-((R)-3-(naphthalen-2-ylmethoxy)-1-oxo-1-(4-phenylpiperidin-1-yl)propan-2-yl)butanamide, naphthalene-2,3-diylbis((4-(2-methoxyphenyl)piperazin-1-yl)methanone), (R)-2-amino-N-(3-(benzyloxy)-1-oxo-1-(4-phenylpiperazin-1-yl)propan-2-yl)-2-methylpropanamide, or (R)-2-amino-3-(benzyloxy)-1-(4-phenylpiperazin-1-yl)propan-1-one.

[0185] Examples of urotensin analogues suitable for use as a TM of the present invention comprise: Cpa-c [D-Cys-Phe-Trp-Lys-Thr-Cys]-Val-NH2; and Asp-c[Cys-Phe-Trp-Lys-Tyr-Cys]-Val-OH.

[0186] The polypeptides of the present invention lack a functional H_{C} domain of a clostridial neurotoxin. Accordingly, said polypeptides are not able to bind rat synaptosomal membranes (via a clostridial H_{C} component) in binding assays as described in Shone et al. (1985) Eur. J. Biochem. 151, 75-82. In a preferred embodiment, the polypeptides preferably lack the last 50 C-terminal amino acids of a clostridial neurotoxin holotoxin. In another embodiment, the polypeptides preferably lack the last 100, preferably the last 150, more preferably the last 200, particularly preferably the last 250, and most preferably the last 300 C-terminal amino acid residues of a clostridial neurotoxin holotoxin. Alternatively, the Hc binding activity may be negated/reduced by mutagenesis—by way of example, referring to BoNT/A for convenience, modification of one or two amino acid residue mutations (W1266 to L and Y1267 to F) in the ganglioside binding pocket causes the H_{C} region to lose its receptor binding function. Analogous mutations may be made to non-serotype A clostridial peptide components, e.g. a construct based on botulinum B with mutations (W1262 to L and Y1263 to F) or botulinum E (W1224 to L and Y1225 to F). Other mutations to the active site achieve the same ablation of H_{C} receptor binding activity, e.g. Y1267S in botulinum type A toxin and the corresponding highly conserved residue in the other clostridial neurotoxins. Details of this and other mutations are described in Rummel et al (2004) (Molecular Microbiol. 51:631-634), which is hereby incorporated by reference thereto.

[0187] In another embodiment, the polypeptides of the present invention lack a functional H_{C} domain of a clostridial neurotoxin and also lack any functionally equivalent TM. Accordingly, said polypeptides lack the natural binding function of a clostridial neurotoxin and are not able to bind rat synaptosomal membranes (via a clostridial H_{C} component, or via any functionally equivalent TM) in binding assays as described in Shone et al. (1985) Eur. J. Biochem. 151, 75-82.

[0188] In one embodiment, the TM is preferably not a Wheat Germ Agglutinin (WGA) peptide.

[0189] The H_{C} peptide of a native clostridial neurotoxin comprises approximately 400-440 amino acid residues, and consists of two functionally distinct domains of approximately 25 kDa each, namely the N-terminal region (commonly referred to as the H_{CN} peptide or domain) and the C-terminal region (commonly referred to as the H_{CC} peptide or domain). This fact is confirmed by the following publications, each of which is herein incorporated in its entirety by reference thereto: Umland TC (1997) Nat. Struct. Biol. 4: 788-792; Herreros J (2000) Biochem. J. 347: 199-204; Halpern J (1993) J. Biol. Chem. 268: 15, pp. 11188-11192; Rummel A (2007) PNAS 104: 359-364; Lacey DB (1998) Nat. Struct. Biol. 5: 898-902; Knapp (1998) Am. Cryst. Assoc. Abstract Papers 25: 90; Swaminathan and Eswaramoorthy (2000) Nat. Struct. Biol. 7: 1751-1759; and Rummel A (2004) Mol. Microbiol. 51(3), 631-643. Moreover, it has been well documented that the C-terminal region (H_{CC}), which constitutes the C-terminal 160-200 amino acid residues, is responsible for binding of a clostridial neurotoxin to its natural cell receptors, namely to nerve terminals at the neuromuscular junction—this fact is also confirmed by the above publications. Thus, reference throughout this specification to a clostridial heavy-chain lacking a functional heavy chain H_{C} peptide (or domain) such that the heavy-chain is incapable of binding to cell surface receptors to which a native clostridial neurotoxin binds means that the clostridial heavy-chain simply lacks a functional H_{CC} peptide. In other words, the H_{CC} peptide region is either partially or wholly deleted, or otherwise modified (e.g. through conventional chemical or proteolytic treatment) to inactivate its native binding ability for nerve terminals at the neuromuscular junction.

[0190] Thus, in one embodiment, a clostridial H_{N} peptide of the present invention lacks part of a C-terminal peptide portion (H_{CC}) of a clostridial neurotoxin and thus lacks the H_{C} binding function of native clostridial neurotoxin. By way of example, in one embodiment, the C-terminally extended clostridial H_{N} peptide lacks the C-terminal 40 amino acid residues, or the C-terminal 60 amino acid residues, or the C-terminal 80 amino acid residues, or the C-terminal 100 amino acid residues, or the C-terminal 120 amino acid residues, or the C-terminal 140 amino acid residues, or the C-terminal 150 amino acid residues, or the C-terminal 160 amino acid residues of a clostridial neurotoxin heavy-chain. In another embodiment, the clostridial H_{N} peptide of the present invention lacks the entire C-terminal peptide portion (H_{CC}) of a clostridial neurotoxin and thus lacks the H_{C} binding function of native clostridial neurotoxin. By way of example, in one embodiment, the clostridial H_{N} peptide lacks the C-terminal 165 amino acid residues, or the C-terminal 170 amino acid residues, or the C-terminal 175 amino acid residues, or the C-terminal 180 amino acid residues, or the C-terminal 185 amino acid residues, or the C-terminal 190 amino acid residues, or the C-terminal 195 amino acid residues of a clostridial neurotoxin heavy-chain. By way of further example, the clostridial H_{N} peptide of the present invention lacks a clostridial H_{CC} reference sequence selected from the group consisting of:
[0191] Botulinum type A neurotoxin—amino acid residues (Y1111-L1296)
[0192] Botulinum type B neurotoxin—amino acid residues (Y1098-E1291)
[0193] Botulinum type C neurotoxin—amino acid residues (Y1112-E1291)
[0194] Botulinum type D neurotoxin—amino acid residues (Y1099-E1276)
[0195] Botulinum type E neurotoxin—amino acid residues (Y1086-K1252)
[0196] Botulinum type F neurotoxin—amino acid residues (Y1106-E1274)
[0197] Botulinum type G neurotoxin—amino acid residues (Y1106-E1297)
[0198] Tetanus neurotoxin—amino acid residues (Y1128-D1315).

[0199] The above-identified reference sequences should be considered a guide as slight variations may occur according to sub-serotypes.

[0200] The protease of the present invention embraces all non-cytotoxic proteases that are capable of cleaving one or more proteins of the exocytic fusion apparatus in eukaryotic cells.

[0201] The protease of the present invention is preferably a bacterial protease (or fragment thereof). More preferably the bacterial protease is selected from the genera Clostridium or Neisseria/Streptococcus (e.g. a clostridial L-chain, or a neisserial IgA protease preferably from N. gonorrhoeae or S. pneumoniae).

[0202] The present invention also embraces variant non-cytotoxic proteases (ie. variants of naturally-occurring protease molecules), so long as the variant proteases still demonstrate the requisite protease activity. By way of example, a variant may have at least 70%, preferably at least 80%, more preferably at least 90%, and most preferably at least 95 or at least 98% amino acid sequence homology with a reference protease sequence. Thus, the term variant includes non-cytotic proteases having enhanced (or decreased) endopeptidase activity—particular mention here is made to the increased K_{cat}/Kₘ of BoNT/A mutants Q161A, E54A, and K165L see Ahmed, S. A. (2008) Protein J. DOI 10.1007/s10930-007-9118-8, which is incorporated by reference thereto. The term fragment, when used in relation to a protease, typically means a peptide having at least 150, preferably at least 200, more preferably at least 250, and most preferably at least 300 amino acid residues of the reference protease. As with the TM ‘fragment’ component (discussed above), protease ‘fragments’ of the present invention embrace fragments of variant proteases based on a reference sequence.

[0203] The protease of the present invention preferably demonstrates a serine or metalloprotease activity (e.g. endopeptidase activity). The protease is preferably specific for a SNARE protein (e.g. SNAP-25, synaptobrevin/VAMP, or syntaxin).

[0204] Particular mention is made to the protease domains of neurotoxins, for example the protease domains of bacterial neurotoxins. Thus, the present invention embraces the use of neurotoxin domains, which occur in nature, as well as recombinantly prepared versions of said naturally-occurring neurotoxins.

[0205] Exemplary neurotoxins are produced by clostridia, and the term clostridial neurotoxin embraces neurotoxins produced by C. tetani (TeNT), and by C. botulinum (BoNT) serotypes A-G, as well as the closely related BoNT-like neurotoxins produced by C. baratii and C. butyricum. The above-mentioned abbreviations are used throughout the present specification. For example, the nomenclature BoNT/A denotes the source of neurotoxin as BoNT (serotype A). Corresponding nomenclature applies to other BoNT serotypes.

[0206] BoNTs are the most potent toxins known, with median lethal dose (LD50) values for mice ranging from 0.5 to 5 ng/kg depending on the serotype. BoNTs are adsorbed in the gastrointestinal tract, and, after entering the general circulation, bind to the presynaptic membrane of cholinergic nerve terminals and prevent the release of their neurotransmitter acetylcholine. BoNT/B, BoNT/D, BoNT/F and BoNT/G cleave synaptobrevin/vesicle-associated membrane protein (VAMP); BoNT/C, BoNT/A and BoNT/E cleave the synaptosomal-associated protein of 25 kDa (SNAP-25); and BoNT/C cleaves syntaxin.

[0207] BoNTs share a common structure, being di-chain proteins of ˜150 kDa, consisting of a heavy chain (H-chain) of ˜100 kDa covalently joined by a single disulphide bond to a light chain (L-chain) of ˜50 kDa. The H-chain consists of two domains, each of ˜50 kDa. The C-terminal domain (H_{C}) is required for the high-affinity neuronal binding, whereas the N-terminal domain (H_{N}) is proposed to be involved in membrane translocation. The L-chain is a zinc-dependent metalloprotease responsible for the cleavage of the substrate SNARE protein.

[0208] The term L-chain fragment means a component of the L-chain of a neurotoxin, which fragment demonstrates a metalloprotease activity and is capable of proteolytically cleaving a vesicle and/or plasma membrane associated protein involved in cellular exocytosis.

[0209] Examples of suitable protease (reference) sequences include:
[0210] Botulinum type A neurotoxin—amino acid residues (1-448)
[0211] Botulinum type B neurotoxin—amino acid residues (1-440)
[0212] Botulinum type C neurotoxin—amino acid residues (1-441)
[0213] Botulinum type D neurotoxin—amino acid residues (1-445)
[0214] Botulinum type E neurotoxin—amino acid residues (1-422)
[0215] Botulinum type F neurotoxin—amino acid residues (1-439)
[0216] Botulinum type G neurotoxin—amino acid residues (1-441)
[0217] Tetanus neurotoxin—amino acid residues (1-457)
[0218] IgA protease—amino acid residues (1-959)*
[0219] *Pohlner, J. et al. (1987). Nature 325, pp. 458-462, which is hereby incorporated by reference thereto.

[0220] The above-identified reference sequence should be considered a guide as slight variations may occur according to sub-serotypes. By way of example, US 2007/0166332 (hereby incorporated by reference thereto) cites slightly different clostridial sequences:
[0221] Botulinum type A neurotoxin—amino acid residues (M1-K448)
[0222] Botulinum type B neurotoxin—amino acid residues (M1-K441)
[0223] Botulinum type C neurotoxin—amino acid residues (M1-K449)
[0224] Botulinum type D neurotoxin—amino acid residues (M1-R445)
[0225] Botulinum type E neurotoxin—amino acid residues (M1-R422)
[0226] Botulinum type F neurotoxin—amino acid residues (M1-K439)
[0227] Botulinum type G neurotoxin—amino acid residues (M1-K446)
[0228] Tetanus neurotoxin—amino acid residues (M1-A457)

[0229] A variety of clostridial toxin fragments comprising the light chain can be useful in aspects of the present invention with the proviso that these light chain fragments can specifically target the core components of the neurotransmitter release apparatus and thus participate in executing the overall cellular mechanism whereby a clostridial toxin proteolytically cleaves a substrate. The light chains of clostridial toxins are approximately 420-460 amino acids in length and comprise an enzymatic domain. Research has shown that the entire length of a clostridial toxin light chain is not necessary for the enzymatic activity of the enzymatic domain. As a non-limiting example, the first eight amino acids of the BoNT/A light chain are not required for enzymatic activity. As another non-limiting example, the first eight amino acids of the TeNT light chain are not required for enzymatic activity. Likewise, the carboxyl-terminus of the light chain is not necessary for activity. As a non-limiting example, the last 32 amino acids of the BoNT/A light chain (residues 417-448) are not required for enzymatic activity. As another non-limiting example, the last 31 amino acids of the TeNT light chain (residues 427-457) are not required for enzymatic activity. Thus, aspects of this embodiment can include clostridial toxin light chains comprising an enzymatic domain having a length of, for example, at least 350 amino acids, at least 375 amino acids, at least 400 amino acids, at least 425 amino acids and at least 450 amino acids. Other aspects of this embodiment can include clostridial toxin light chains comprising an enzymatic domain having a length of, for example, at most 350 amino acids, at most 375 amino acids, at most 400 amino acids, at most 425 amino acids and at most 450 amino acids.

[0230] The non-cytotoxic protease component of the present invention preferably comprises a BoNT/A, BoNT/B or BoNT/D serotype L-chain (or fragment or variant thereof).

[0231] The polypeptides of the present invention, especially the protease component thereof, may be PEGylated—this may help to increase stability, for example duration of action of the protease component. PEGylation is particularly preferred when the protease comprises a BoNT/A, B or C₁ protease. PEGylation preferably includes the addition of PEG to the N-terminus of the protease component. By way of example, the N-terminus of a protease may be extended with one or more amino acid (e.g. cysteine) residues, which may be the same or different. One or more of said amino acid residues may have its own PEG molecule attached (e.g. covalently attached) thereto. An example of this technology is described in WO2007/104567, which is incorporated in its entirety by reference thereto.

[0232] A Translocation Domain is a molecule that enables translocation of a protease into a target cell such that a functional expression of protease activity occurs within the cytosol of the target cell. Whether any molecule (e.g. a protein or peptide) possesses the requisite translocation function of the present invention may be confirmed by any one of a number of conventional assays.

[0233] For example, Shone C. (1987) describes an in vitro assay employing liposomes, which are challenged with a test molecule. Presence of the requisite translocation function is confirmed by release from the liposomes of K⁺ and/or labelled NAD, which may be readily monitored [see Shone C. (1987) Eur. J. Biochem; vol. 167(1): pp. 175-180].

[0234] A further example is provided by Blaustein R. (1987), which describes a simple in vitro assay employing planar phospholipid bilayer membranes. The membranes are challenged with a test molecule and the requisite translocation function is confirmed by an increase in conductance across said membranes [see Blaustein (1987) FEBS Letts; vol. 226, no. 1: pp. 115-120].

[0235] Additional methodology to enable assessment of membrane fusion and thus identification of Translocation Domains suitable for use in the present invention are provided by Methods in Enzymology Vol 220 and 221, Membrane Fusion Techniques, Parts A and B, Academic Press 1993.

[0236] The present invention also embraces variant translocation domains, so long as the variant domains still demonstrate the requisite translocation activity. By way of example, a variant may have at least 70%, preferably at least 80%, more preferably at least 90%, and most preferably at least 95% or at least 98% amino acid sequence homology with a reference translocation domain. The term fragment, when used in relation to a translocation domain, means a peptide having at least 20, preferably at least 40, more preferably at least 80, and most preferably at least 100 amino acid residues of the reference translocation domain. In the case of a clostridial translocation domain, the fragment preferably has at least 100, preferably at least 150, more preferably at least 200, and most preferably at least 250 amino acid residues of the reference translocation domain (eg. H_{N} domain). As with the TM ‘fragment’ component (discussed above), translocation ‘fragments’ of the present invention embrace fragments of variant translocation domains based on the reference sequences.

[0237] The Translocation Domain is preferably capable of formation of ion-permeable pores in lipid membranes under conditions of low pH. Preferably it has been found to use only those portions of the protein molecule capable of pore-formation within the endosomal membrane.

[0238] The Translocation Domain may be obtained from a microbial protein source, in particular from a bacterial or viral protein source. Hence, in one embodiment, the Translocation Domain is a translocating domain of an enzyme, such as a bacterial toxin or viral protein.

[0239] It is well documented that certain domains of bacterial toxin molecules are capable of forming such pores. It is also known that certain translocation domains of virally expressed membrane fusion proteins are capable of forming such pores. Such domains may be employed in the present invention.

[0240] The Translocation Domain may be of a clostridial origin, such as the H_{N} domain (or a functional component thereof). H_{N} means a portion or fragment of the H-chain of a clostridial neurotoxin approximately equivalent to the amino-terminal half of the H-chain, or the domain corresponding to that fragment in the intact H-chain. The H-chain lacks the natural binding function of the H_{C} component of the H-chain. In this regard, the H_{C} function may be removed by deletion of the H_{C} amino acid sequence (either at the DNA synthesis level, or at the post-synthesis level by nuclease or protease treatment). Alternatively, the H_{C} function may be inactivated by chemical or biological treatment. Thus, the H-chain is incapable of binding to the Binding Site on a target cell to which native clostridial neurotoxin (i.e. holotoxin) binds.

[0241] Examples of suitable (reference) Translocation Domains include:
[0242] Botulinum type A neurotoxin—amino acid residues (449-871)
[0243] Botulinum type B neurotoxin—amino acid residues (441-858)
[0244] Botulinum type C neurotoxin—amino acid residues (442-866)
[0245] Botulinum type D neurotoxin—amino acid residues (446-862)
[0246] Botulinum type E neurotoxin—amino acid residues (423-845)
[0247] Botulinum type F neurotoxin—amino acid residues (440-864)
[0248] Botulinum type G neurotoxin—amino acid residues (442-863)
[0249] Tetanus neurotoxin—amino acid residues (458-879)

[0250] The above-identified reference sequence should be considered a guide as slight variations may occur according to sub-serotypes. By way of example, US 2007/0166332 (hereby incorporated by reference thereto) cites slightly different clostridial sequences:
[0251] Botulinum type A neurotoxin—amino acid residues (A449-K871)
[0252] Botulinum type B neurotoxin—amino acid residues (A442-5858)
[0253] Botulinum type C neurotoxin—amino acid residues (T450-N866)
[0254] Botulinum type D neurotoxin—amino acid residues (D446-N862)
[0255] Botulinum type E neurotoxin—amino acid residues (K423-K845)
[0256] Botulinum type F neurotoxin—amino acid residues (A440-K864)
[0257] Botulinum type G neurotoxin—amino acid residues (S447-S863)
[0258] Tetanus neurotoxin—amino acid residues (S458-V879)

[0259] In the context of the present invention, a variety of Clostridial toxin H_{N} regions comprising a translocation domain can be useful in aspects of the present invention with the proviso that these active fragments can facilitate the release of a non-cytotoxic protease (e.g. a clostridial L-chain) from intracellular vesicles into the cytoplasm of the target cell and thus participate in executing the overall cellular mechanism whereby a clostridial toxin proteolytically cleaves a substrate. The H_{N} regions from the heavy chains of Clostridial toxins are approximately 410-430 amino acids in length and comprise a translocation domain. Research has shown that the entire length of a H_{N} region from a Clostridial toxin heavy chain is not necessary for the translocating activity of the translocation domain. Thus, aspects of this embodiment can include clostridial toxin H_{N} regions comprising a translocation domain having a length of, for example, at least 350 amino acids, at least 375 amino acids, at least 400 amino acids and at least 425 amino acids. Other aspects of this embodiment can include clostridial toxin H_{N} regions comprising translocation domain having a length of, for example, at most 350 amino acids, at most 375 amino acids, at most 400 amino acids and at most 425 amino acids.

[0260] For further details on the genetic basis of toxin production in Clostridium botulinum and C. tetani, we refer to Henderson et al (1997) in The Clostridia: Molecular Biology and Pathogenesis, Academic press.

[0261] The term H_{N} embraces naturally-occurring neurotoxin H_{N} portions, and modified H_{N} portions having amino acid sequences that do not occur in nature and/or synthetic amino acid residues, so long as the modified H_{N} portions still demonstrate the above-mentioned translocation function.

[0262] Alternatively, the Translocation Domain may be of a non-clostridial origin. Examples of non-clostridial (reference) Translocation Domain origins include, but not be restricted to, the translocation domain of diphtheria toxin [O=Keefe et al., Proc. Natl. Acad. Sci. USA (1992) 89, 6202-6206; Silverman et al., J. Biol. Chem. (1993) 269, 22524-22532; and London, E. (1992) Biochem. Biophys. Acta., 1112, pp. 25-51], the translocation domain of Pseudomonas exotoxin type A [Prior et al. Biochemistry (1992) 31, 3555-3559], the translocation domains of anthrax toxin [Blanke et al. Proc. Natl. Acad. Sci. USA (1996) 93, 8437-8442], a variety of fusogenic or hydrophobic peptides of translocating function [Plank et al. J. Biol. Chem. (1994) 269, 12918-12924; and Wagner et al (1992) PNAS, 89, pp. 7934-7938], and amphiphilic peptides [Murata et al (1992) Biochem., 31, pp. 1986-1992]. The Translocation Domain may mirror the Translocation Domain present in a naturally-occurring protein, or may include amino acid variations so long as the variations do not destroy the translocating ability of the Translocation Domain.

[0263] Particular examples of viral (reference) Translocation Domains suitable for use in the present invention include certain translocating domains of virally expressed membrane fusion proteins. For example, Wagner et al. (1992) and Murata et al. (1992) describe the translocation (i.e. membrane fusion and vesiculation) function of a number of fusogenic and amphiphilic peptides derived from the N-terminal region of influenza virus haemagglutinin. Other virally expressed membrane fusion proteins known to have the desired translocating activity are a translocating domain of a fusogenic peptide of Semliki Forest Virus (SFV), a translocating domain of vesicular stomatitis virus (VSV) glycoprotein G, a translocating domain of SER virus F protein and a translocating domain of Foamy virus envelope glycoprotein. Virally encoded Aspike proteins have particular application in the context of the present invention, for example, the E1 protein of SFV and the G protein of the G protein of VSV.

[0264] Use of the (reference) Translocation Domains listed in Table (below) includes use of sequence variants thereof. A variant may comprise one or more conservative nucleic acid substitutions and/or nucleic acid deletions or insertions, with the proviso that the variant possesses the requisite translocating function. A variant may also comprise one or more amino acid substitutions and/or amino acid deletions or insertions, so long as the variant possesses the requisite translocating function.

| Translocation | Amino acid | |
|---|---|---|
| Domain source | residues | References |
| Diphtheria | 194-380 | Silverman et al., 1994, J. Biol. |
| toxin | | Chem. 269, 22524-22532 |
| | | London E., 1992, Biochem. |
| | | Biophys. Acta., 1113, 25-51 |
| Domain II of | 405-613 | Prior et al., 1992, |
| pseudomonas | | Biochemistry 31, 3555-3559 |
| exotoxin | | Kihara & Pastan, 1994, |
| | | Bioconj Chem. 5, 532-538 |
| Influenza virus | GLFGAIAGFIENGW | Plank et al., 1994, J. Biol. |
| haemagglutinin | EGMIDGWYG (SEQ | Chem. 269, 12918-12924 |
| | ID NO: 117), and | Wagner et al., 1992, PNAS, |
| | Variants thereof | 89, 7934-7938 |
| | | Murata et al., 1992, |
| | | Biochemistry 31, 1986-1992 |
| Semliki Forest | Translocation | Kielian et al., 1996, J Cell Biol. |
| virus fusogenic | domain | 134(4), 863-872 |
| protein | | |
| Vesicular | 118-139 | Yao et al., 2003, Virology |
| Stomatitis virus | | 310(2), 319-332 |
| glycoprotein G | | |
| SER virus F | Translocation domain | Seth et al., 2003, J Virol |
| protein | | 77(11) 6520-6527 |
| Foamy virus | Translocation domain | Picard-Maureau et al., 2003, J |
| envelope | | Virol. 77(8), 4722-4730 |
| glycoprotein | | |

[0265] The polypeptides of the present invention may further comprise a translocation facilitating domain. Said domain facilitates delivery of the non-cytotoxic protease into the cytosol of the target cell and are described, for example, in WO 08/008,803 and WO 08/008,805, each of which is herein incorporated by reference thereto.

[0266] By way of example, suitable translocation facilitating domains include an enveloped virus fusogenic peptide domain, for example, suitable fusogenic peptide domains include influenzavirus fusogenic peptide domain (eg. influenza A virus fusogenic peptide domain of 23 amino acids), alphavirus fusogenic peptide domain (eg. Semliki Forest virus fusogenic peptide domain of 26 amino acids), vesiculovirus fusogenic peptide domain (eg. vesicular stomatitis virus fusogenic peptide domain of 21 amino acids), respirovirus fusogenic peptide domain (eg. Sendai virus fusogenic peptide domain of 25 amino acids), morbiliivirus fusogenic peptide domain (eg. Canine distemper virus fusogenic peptide domain of 25 amino acids), avulavirus fusogenic peptide domain (eg. Newcastle disease virus fusogenic peptide domain of 25 amino acids), henipavirus fusogenic peptide domain (eg. Hendra virus fusogenic peptide domain of 25 amino acids), metapneumovirus fusogenic peptide domain (eg. Human metapneumovirus fusogenic peptide domain of 25 amino acids) or spumavirus fusogenic peptide domain such as simian foamy virus fusogenic peptide domain; or fragments or variants thereof.

[0267] By way of further example, a translocation facilitating domain may comprise a Clostridial toxin H_{CN} domain or a fragment or variant thereof. In more detail, a Clostridial toxin H_{CN} translocation facilitating domain may have a length of at least 200 amino acids, at least 225 amino acids, at least 250 amino acids, at least 275 amino acids. In this regard, a Clostridial toxin H_{CN} translocation facilitating domain preferably has a length of at most 200 amino acids, at most 225 amino acids, at most 250 amino acids, or at most 275 amino acids. Specific (reference) examples include:
[0268] Botulinum type A neurotoxin—amino acid residues (872-1110)
[0269] Botulinum type B neurotoxin—amino acid residues (859-1097)
[0270] Botulinum type C neurotoxin—amino acid residues (867-1111)
[0271] Botulinum type D neurotoxin—amino acid residues (863-1098)
[0272] Botulinum type E neurotoxin—amino acid residues (846-1085)
[0273] Botulinum type F neurotoxin—amino acid residues (865-1105)
[0274] Botulinum type G neurotoxin—amino acid residues (864-1105)
[0275] Tetanus neurotoxin—amino acid residues (880-1127)

[0276] The above sequence positions may vary a little according to serotype/sub-type, and further examples of suitable (reference) Clostridial toxin H_{CN} domains include:
[0277] Botulinum type A neurotoxin—amino acid residues (874-1110)
[0278] Botulinum type B neurotoxin—amino acid residues (861-1097)
[0279] Botulinum type C neurotoxin—amino acid residues (869-1111)
[0280] Botulinum type D neurotoxin—amino acid residues (865-1098)
[0281] Botulinum type E neurotoxin—amino acid residues (848-1085)
[0282] Botulinum type F neurotoxin—amino acid residues (867-1105)
[0283] Botulinum type G neurotoxin—amino acid residues (866-1105)
[0284] Tetanus neurotoxin—amino acid residues (882-1127)

[0285] Any of the above-described facilitating domains may be combined with any of the previously described translocation domain peptides that are suitable for use in the present invention. Thus, by way of example, a non-clostridial facilitating domain may be combined with non-clostridial translocation domain peptide or with clostridial translocation domain peptide. Alternatively, a Clostridial toxin H_{CN} translocation facilitating domain may be combined with a non-clostridal translocation domain peptide. Alternatively, a Clostridial toxin H_{CN} facilitating domain may be combined or with a clostridial translocation domain peptide, examples of which include:
[0286] Botulinum type A neurotoxin—amino acid residues (449-1110)
[0287] Botulinum type B neurotoxin—amino acid residues (442-1097)
[0288] Botulinum type C neurotoxin—amino acid residues (450-1111)
[0289] Botulinum type D neurotoxin—amino acid residues (446-1098)
[0290] Botulinum type E neurotoxin—amino acid residues (423-1085)
[0291] Botulinum type F neurotoxin—amino acid residues (440-1105)
[0292] Botulinum type G neurotoxin—amino acid residues (447-1105)
[0293] Tetanus neurotoxin—amino acid residues (458-1127)

### Sequence Homology:

[0294] Any of a variety of sequence alignment methods can be used to determine percent identity, including, without limitation, global methods, local methods and hybrid methods, such as, e.g., segment approach methods. Protocols to determine percent identity are routine procedures within the scope of one skilled in the art. Global methods align sequences from the beginning to the end of the molecule and determine the best alignment by adding up scores of individual residue pairs and by imposing gap penalties. Non-limiting methods include, e.g., CLUSTAL W, see, e.g., Julie D. Thompson et al., CLUSTAL W: Improving the Sensitivity of Progressive Multiple Sequence Alignment Through Sequence Weighting, Position-Specific Gap Penalties and Weight Matrix Choice, 22(22) Nucleic Acids Research 4673-4680 (1994); and iterative refinement, see, e.g., Osamu Gotoh, Significant Improvement in Accuracy of Multiple Protein. Sequence Alignments by Iterative Refinement as Assessed by Reference to Structural Alignments, 264(4) J. Mol. Biol. 823-838 (1996). Local methods align sequences by identifying one or more conserved motifs shared by all of the input sequences. Non-limiting methods include, e.g., Match-box, see, e.g., Eric Depiereux and Ernest Feytmans, Match-Box: A Fundamentally New Algorithm for the Simultaneous Alignment of Several Protein Sequences, 8(5) CABIOS 501-509 (1992); Gibbs sampling, see, e.g., C. E. Lawrence et al., Detecting Subtle Sequence Signals: A Gibbs Sampling Strategy for Multiple Alignment, 262(5131) Science 208-214 (1993); Align-M, see, e.g., Ivo Van Wane et al., Align-M—A New Algorithm for Multiple Alignment of Highly Divergent Sequences, 20(9) Bioinformatics: 1428-1435 (2004).

[0295] Thus, percent sequence identity is determined by conventional methods. See, for example, Altschul et al., Bull. Math. Bio. 48: 603-16, 1986 and Henikoff and Henikoff, Proc. Natl. Acad. Sci. USA 89:10915-19, 1992. Briefly, two amino acid sequences are aligned to optimize the alignment scores using a gap opening penalty of 10, a gap extension penalty of 1, and the “blosum 62” scoring matrix of Henikoff and Henikoff (ibid.) as shown below (amino acids are indicated by the standard one-letter codes).

### Alignment Scores for Determining Sequence Identity

| | A | R | N | D | C | Q | E | G | H | I | L | K | M | F | P | S | T | W | Y | V |
|---|---|---|---|---|---|---|---|---|---|---|---|---|---|---|---|---|---|---|---|---|
| A | 4 | | | | | | | | | | | | | | | | | | | |
| R | −1 | 5 | | | | | | | | | | | | | | | | | | |
| N | −2 | 0 | 6 | | | | | | | | | | | | | | | | | |
| D | −2 | −2 | 1 | 6 | | | | | | | | | | | | | | | | |
| C | 0 | −3 | −3 | −3 | 9 | | | | | | | | | | | | | | | |
| Q | −1 | 1 | 0 | 0 | −3 | 5 | | | | | | | | | | | | | | |
| E | −1 | 0 | 0 | 2 | −4 | 2 | 5 | | | | | | | | | | | | | |
| G | 0 | −2 | 0 | −1 | −3 | −2 | −2 | 6 | | | | | | | | | | | | |
| H | −2 | 0 | 1 | −1 | −3 | 0 | 0 | −2 | 8 | | | | | | | | | | | |
| I | −1 | −3 | −3 | −3 | −1 | −3 | −3 | −4 | −3 | 4 | | | | | | | | | | |
| L | −1 | −2 | −3 | −4 | −1 | −2 | −3 | −4 | −3 | 2 | 4 | | | | | | | | | |
| K | −1 | 2 | 0 | −1 | −3 | 1 | 1 | −2 | −1 | −3 | −2 | 5 | | | | | | | | |
| M | −1 | −1 | −2 | −3 | −1 | 0 | −2 | −3 | −2 | 1 | 2 | −1 | 5 | | | | | | | |
| F | −2 | −3 | −3 | −3 | −2 | −3 | −3 | −3 | −1 | 0 | 0 | −3 | 0 | 6 | | | | | | |
| P | −1 | −2 | −2 | −1 | −3 | −1 | −1 | −2 | −2 | −3 | −3 | −1 | −2 | −4 | 7 | | | | | |
| S | 1 | −1 | 1 | 0 | −1 | 0 | 0 | 0 | −1 | −2 | −2 | 0 | −1 | −2 | −1 | 4 | | | | |
| T | 0 | −1 | 0 | −1 | −1 | −1 | −1 | −2 | −2 | −1 | −1 | −1 | −1 | −2 | −1 | 1 | 5 | | | |
| W | −3 | −3 | −4 | −4 | −2 | −2 | −3 | −2 | −2 | −3 | −2 | −3 | −1 | 1 | −4 | −3 | −2 | 11 | | |
| Y | −2 | −2 | −2 | −3 | −2 | −1 | −2 | −3 | 2 | −1 | −1 | −2 | −1 | 3 | −3 | −2 | −2 | 2 | 7 | |
| V | 0 | −3 | −3 | −3 | −1 | −2 | −2 | −3 | −3 | 3 | 1 | −2 | 1 | −1 | −2 | −2 | 0 | −3 | −1 | 4 |

[0297] The percent identity is then calculated as:

$$\frac{( Total number of identical matches )}{[ \begin{matrix}length of the longer sequence plus the number \\ of gaps introduced into the longer sequence in \\ order to align the two sequences\end{matrix} ]} \times 100$$

[0298] Substantially homologous polypeptides are characterized as having one or more amino acid substitutions, deletions or additions. These changes are preferably of a minor nature, that is conservative amino acid substitutions (see below) and other substitutions that do not significantly affect the folding or activity of the polypeptide; small deletions, typically of one to about 30 amino acids; and small amino- or carboxyl-terminal extensions, such as an amino-terminal methionine residue, a small linker peptide of up to about 20-25 residues, or an affinity tag.

### Conservative Amino Acid Substitutions

[0299] Basic:
   [0300] arginine
   [0301] lysine
   [0302] histidine
[0303] Acidic:
   [0304] glutamic acid
   [0305] aspartic acid
[0306] Polar:
   [0307] glutamine
   [0308] asparagine
[0309] Hydrophobic:
   [0310] leucine
   [0311] isoleucine
   [0312] valine
[0313] Aromatic:
   [0314] phenylalanine
   [0315] tryptophan
   [0316] tyrosine
[0317] Small:
   [0318] glycine
   [0319] alanine
   [0320] serine
   [0321] threonine
   [0322] methionine

[0323] In addition to the 20 standard amino acids, non-standard amino acids (such as 4-hydroxyproline, 6-N-methyl lysine, 2-aminoisobutyric acid, isovaline and α-methyl serine) may be substituted for amino acid residues of the polypeptides of the present invention. A limited number of non-conservative amino acids, amino acids that are not encoded by the genetic code, and unnatural amino acids may be substituted for clostridial polypeptide amino acid residues. The polypeptides of the present invention can also comprise non-naturally occurring amino acid residues.

[0324] Non-naturally occurring amino acids include, without limitation, trans-3-methylproline, 2,4-methano-proline, cis-4-hydroxyproline, trans-4-hydroxyproline, N-methylglycine, allo-threonine, methyl-threonine, hydroxy-ethylcysteine, hydroxyethylhomo-cysteine, nitro-glutamine, homoglutamine, pipecolic acid, tert-leucine, norvaline, 2-azaphenylalanine, 3-azaphenyl-alanine, 4-azaphenyl-alanine, and 4-fluorophenylalanine. Several methods are known in the art for incorporating non-naturally occurring amino acid residues into proteins. For example, an in vitro system can be employed wherein nonsense mutations are suppressed using chemically aminoacylated suppressor tRNAs. Methods for synthesizing amino acids and aminoacylating tRNA are known in the art. Transcription and translation of plasmids containing nonsense mutations is carried out in a cell free system comprising an E. coli S30 extract and commercially available enzymes and other reagents. Proteins are purified by chromatography. See, for example, Robertson et al., J. Am. Chem. Soc. 113:2722, 1991; Ellman et al., Methods Enzymol. 202:301, 1991; Chung et al., Science 259:806-9, 1993; and Chung et al., Proc. Natl. Acad. Sci. USA 90:10145-9, 1993). In a second method, translation is carried out in Xenopus oocytes by microinjection of mutated mRNA and chemically aminoacylated suppressor tRNAs (Turcatti et al., J. Biol. Chem. 271:19991-8, 1996). Within a third method, E. coli cells are cultured in the absence of a natural amino acid that is to be replaced (e.g., phenylalanine) and in the presence of the desired non-naturally occurring amino acid(s) (e.g., 2-azaphenylalanine, 3-azaphenylalanine, 4-azaphenylalanine, or 4-fluorophenylalanine). The non-naturally occurring amino acid is incorporated into the polypeptide in place of its natural counterpart. See, Koide et al., Biochem. 33:7470-6, 1994. Naturally occurring amino acid residues can be converted to non-naturally occurring species by in vitro chemical modification. Chemical modification can be combined with site-directed mutagenesis to further expand the range of substitutions (Wynn and Richards, Protein Sci. 2:395-403, 1993).

[0325] A limited number of non-conservative amino acids, amino acids that are not encoded by the genetic code, non-naturally occurring amino acids, and unnatural amino acids may be substituted for amino acid residues of polypeptides of the present invention.

[0326] Essential amino acids in the polypeptides of the present invention can be identified according to procedures known in the art, such as site-directed mutagenesis or alanine-scanning mutagenesis (Cunningham and Wells, Science 244: 1081-5, 1989). Sites of biological interaction can also be determined by physical analysis of structure, as determined by such techniques as nuclear magnetic resonance, crystallography, electron diffraction or photoaffinity labeling, in conjunction with mutation of putative contact site amino acids. See, for example, de Vos et al., Science 255:306-12, 1992; Smith et al., J. Mol. Biol. 224:899-904, 1992; Wlodaver et al., FEBS Lett. 309:59-64, 1992. The identities of essential amino acids can also be inferred from analysis of homologies with related components (e.g. the translocation or protease components) of the polypeptides of the present invention.

[0327] Multiple amino acid substitutions can be made and tested using known methods of mutagenesis and screening, such as those disclosed by Reidhaar-Olson and Sauer (Science 241:53-7, 1988) or Bowie and Sauer (Proc. Natl. Acad. Sci. USA 86:2152-6, 1989). Briefly, these authors disclose methods for simultaneously randomizing two or more positions in a polypeptide, selecting for functional polypeptide, and then sequencing the mutagenized polypeptides to determine the spectrum of allowable substitutions at each position. Other methods that can be used include phage display (e.g., Lowman et al., Biochem. 30:10832-7, 1991; Ladner et al., U.S. Pat. No. 5,223,409; Huse, WIPO Publication WO 92/06204) and region-directed mutagenesis (Derbyshire et al., Gene 46:145, 1986; Ner et al., DNA 7:127, 1988).

[0328] Multiple amino acid substitutions can be made and tested using known methods of mutagenesis and screening, such as those disclosed by Reidhaar-Olson and Sauer (Science 241:53-7, 1988) or Bowie and Sauer (Proc. Natl. Acad. Sci. USA 86:2152-6, 1989). Briefly, these authors disclose methods for simultaneously randomizing two or more positions in a polypeptide, selecting for functional polypeptide, and then sequencing the mutagenized polypeptides to determine the spectrum of allowable substitutions at each position. Other methods that can be used include phage display (e.g., Lowman et al., Biochem. 30:10832-7, 1991; Ladner et al., U.S. Pat. No. 5,223,409; Huse, WIPO Publication WO 92/06204) and region-directed mutagenesis (Derbyshire et al., Gene 46:145, 1986; Ner et al., DNA 7:127, 1988).

[0329] There now follows a brief description of the Figures, which illustrate aspects and/or embodiments of the present invention.

[0330] FIG. 1—Purification of a LH_{N}/C-Rat GHRP Fusion Protein

[0331] Using the methodology outlined in Example 3, a LH_{N}/C-rGHRP fusion protein was purified from E. coli BL21 (DE3) cells. Briefly, the soluble products obtained following cell disruption were applied to a nickel-charged affinity capture column. Bound proteins were eluted with 200 mM imidazole, treated with Factor Xa to activate the fusion protein and then re-applied to a second nickel-charged affinity capture column. Samples from the purification procedure were assessed by SDS-PAGE. Lane 1: Molecular mass markers (kDa), lane 2: Clarified crude cell lysate, lanes 3-5: First nickel chelating Sepharose column eluant (0.1 mg/ml), lanes 6-8: First nickel chelating Sepharose column eluant (0.01 mg/ml), lane 9: Factor Xa digested protein under non-reducing conditions, lane 10: Purified LH_{N}/C-rGHRP under non-reducing conditions, lane 11: Purified LH_{N}/C-rGHRP under reduced conditions.

[0332] FIG. 2—Purification of LH_{N}/C-Rat LEP116-122 Fusion Protein

[0333] Using the methodology outlined in Example 3, a LH_{N}/C-Rat LEP116-122 fusion protein was purified from E. coli BL21 (DE3) cells. Briefly, the soluble products obtained following cell disruption were applied to a nickel-charged affinity capture column. Bound proteins were eluted with 200 mM imidazole, treated with Factor Xa to activate the fusion protein and then re-applied to a second nickel-charged affinity capture column. Samples from the purification procedure were assessed by SDS-PAGE. Lane 1: First nickel chelating Sepharose column eluant, Lane 2: First nickel chelating Sepharose column eluant treated with Factor Xa under non-reducing conditions, Lane 3: First nickel chelating Sepharose column eluant treated with Factor Xa under reducing conditions, lanes 4-6: Second nickel chelating Sepharose column eluant under non-reducing conditions, lane 7-9: Second nickel chelating Sepharose column eluant under reducing conditions, lane 10: Molecular mass markers (kDa),

[0334] FIG. 3—GH Secretion from Differentiated MtT/S Treated with Various LHn

[0335] Using the methodology outlined in the experimental data section: after differentiation of the MtT/S cells with 10⁻⁸M corticosterone the cells were treated during 48 h with one of the following molecule: LHnB (100 nM), LHnC (100 nM) or LHnD (100 nM). The cells were then submitted to a secretion assay using Krebs Medium containing 40 mM KCl for 10 minutes.

[0336] FIG. 4—Purification of LH_{N}/A-GHRH Fusion Protein

[0337] Using the methodology outlined in Example 3, a LH_{N}/A-GHRH fusion protein was purified from E. coli BL21 (DE3) cells. Briefly, the soluble products obtained following cell disruption were applied to a nickel-charged affinity capture column. Bound proteins were eluted with 200 mM imidazole, treated with Factor Xa to activate the fusion protein and then re-applied to a second nickel-charged affinity capture column. Samples from the purification procedure were assessed by SDS-PAGE. Lane 1: Molecular mass markers (kDa), Lane 2: Soluble fraction, Lane 3: First nickel chelating Sepharose column eluant treated with Factor Xa under non-reducing conditions, Lane 4: Second nickel chelating Sepharose column load under non-reducing conditions, Lane 5: Second nickel chelating Sepharose column eluant under non-reducing conditions, Lane 6: Final sample under non reducing conditions Lane 7: Final sample under reducing condition.

[0338] FIG. 5—Purification of LH_{N}/C-GHRH Fusion Protein.

[0339] Using the methodology outlined in Example 3, a LH_{N}/A-GHRH fusion protein was purified from E. coli BL21 (DE3) cells. Briefly, the soluble products obtained following cell disruption were applied to a nickel-charged affinity capture column. Bound proteins were eluted with 200 mM imidazole, treated with Factor Xa to activate the fusion protein and then re-applied to a second nickel-charged affinity capture column. Samples from the purification procedure were assessed by SDS-PAGE. Lane 1: Molecular mass markers (kDa), Lane 2: Soluble fraction, Lane 3: First nickel chelating Sepharose column eluant treated with Factor Xa under non-reducing conditions, Lane 4: Second nickel chelating Sepharose column load under non-reducing conditions, Lane 5: Second nickel chelating Sepharose column eluant under non-reducing conditions, Lane 6: Final sample under non reducing conditions Lane 7: Final sample under reducing condition.

[0340] FIG. 6—LH_{N}/A-GHRH and LH_{N}/C-GHRH Final Product.

[0341] Using the methodology outlined in Example 3, LH_{N}/A-GHRH and LH_{N}/C-GHRH fusion proteins was purified from E. coli BL21 (DE3) cells. Samples from the purification procedure were assessed by SDS-PAGE. Lane 1: Molecular mass markers (kDa), Lane 2: Final sample (LH_{N}/A-GHRH) under non reducing conditions, Lane 3: Final sample (LH_{N}/A-GHRH) under reducing condition, Lane 4: Final sample (LH_{N}/C-GHRH) under non-reducing conditions, Lane 5: Final sample (LH_{N}/C-GHRH) under reducing condition.

[0342] FIG. 7-Activity of CP-GHRH-LHD on Rat IGF-1 Levels In Vivo

[0343] FIG. 7 shows the effects of i.v. administration of CP-GHRH-LHD (SXN101000) on rat IGF-1 levels 5 days after treatment compared to a vehical only control.

[0344] FIG. 8-Activity of CP-GHRH-LHD on Rat IGF-1 Levels In Vivo

[0345] FIG. 8 shows the effects of i.v. administration of CP-GHRH-LHD (SXN101000) on rat IGF-1 levels on day 1 to 8 days after treatment compared to a vehical only control. Due to the blocking of the cannula on days 9 and 10 have too few an n number to be considered.

[0346] FIG. 9-Activity of CP-GHRH-LHD on Rat GH Levels In Vivo

[0347] FIG. 9b shows the effects of i.v. administration of CP-GHRH-LHD (SXN101000) on rat GH levels on day 5 days after treatment compared to a vehical only control (FIG. 9a) and Octreotide infusion (FIG. 9c).

### EXAMPLES

[0348] Example 1
[0349] Preparation of a LH_{N}/C backbone construct
[0350] Example 2
[0351] Construction of LH_{N}/C-human GHRP
[0352] Example 3
[0353] Expression and purification of a LH_{N}/C-human GHRP fusion
[0354] Example 4
[0355] Construction of LH_{N}/D-CP-qGHRH29 fusion protein
[0356] Example 5
[0357] Expression and purification of a LH_{N}/D-CP-qGHRH29 fusion protein
[0358] Example 6
[0359] Chemical conjugation of LH_{N}/A to SST TM
[0360] Example 7
[0361] Method for treating colorectal cancer
[0362] Example 8
[0363] Method for treating breast cancer
[0364] Example 9
[0365] Method for treating prostate cancer
[0366] Example 10
[0367] Method for treating small cell lung cancer
[0368] Example 11
[0369] Method for treating colorectal cancer
[0370] Example 12
[0371] Method for treating small cell lung cancer
[0372] Example 13
[0373] Method for treating prostate cancer
[0374] Example 14
[0375] Method for treating small cell lung cancer
[0376] Example 15
[0377] Method for treating breast cancer
[0378] Example 16
[0379] Method for treating colorectal cancer
[0380] Example 17
[0381] Method for treating prostate cancer
[0382] Example 18
[0383] Method for treating small cell lung cancer
[0384] Example 19
[0385] Method for treating colorectal cancer
[0386] Example 20
[0387] Method for treating breast cancer
[0388] Example 21
[0389] Method for treating colorectal cancer
[0390] Example 22
[0391] Method for treating prostate cancer
[0392] Example 23
[0393] Method for treating breast cancer
[0394] Example 24
[0395] Method for treating small cell lung cancer
[0396] Example 25
[0397] Method for treating colorectal cancer
[0398] Example 26
[0399] Method for treating prostate cancer
[0400] Example 27
[0401] Method for treating breast cancer
[0402] Example 28
[0403] Method for treating small cell lung cancer
[0404] Example 29
[0405] Binding, secretion and in vivo assay
[0406] Example 30
[0407] Method for treating non-small cell lung cancer
[0408] Example 31
[0409] Method for treating non-small cell lung cancer
[0410] Example 32
[0411] Method for treating non-small cell lung cancer
[0412] Example 33
[0413] Method for treating breast cancer
[0414] Example 34
[0415] Method for treating small cell lung cancer
[0416] Example 35
[0417] Method for treating colorectal cancer
[0418] Example 36
[0419] Method for treating prostate cancer
[0420] Example 37
[0421] Activity of CP-GHRH-LHD on rat IGF-1 levels in vivo
[0422] Example 38
[0423] Activity of CP-GHRH-LHD on rat IGF-1 levels in vivo
[0424] Example 39
[0425] Activity of CP-GHRH-LHD on rat growth hormone levels in vivo

### SEQ ID NOs

[0426] Where an initial Met amino acid residue or a corresponding initial codon is indicated in any of the following SEQ ID NOs, said residue/codon is optional.
[0427] SEQ ID1 DNA sequence of LH_{N}/A
[0428] SEQ ID2 DNA sequence of LH_{N}/B
[0429] SEQ ID3 DNA sequence of LH_{N}/C
[0430] SEQ ID4 DNA sequence of LH_{N}/D
[0431] SEQ ID5 DNA sequence of IgA-H_{N}tet
[0432] SEQ ID6 DNA sequence of the human GHRP linker
[0433] SEQ ID7 DNA sequence of the human GHRP-C fusion
[0434] SEQ ID8 Protein sequence of the human GHRP-C fusion
[0435] SEQ ID9 Protein sequence of the human GHRH-D fusion
[0436] SEQ ID10 Protein sequence of the human EGF-D fusion
[0437] SEQ ID11 Protein sequence of the human NGF-D GS35 fusion
[0438] SEQ ID12 Protein sequence of the human LEP116-122-D fusion
[0439] SEQ ID13 Protein sequence of the human VIP-D fusion
[0440] SEQ ID14 Protein sequence of the human LEP116-122-C fusion
[0441] SEQ ID15 Protein sequence of the human IGF1-C fusion
[0442] SEQ ID16 Protein sequence of the human SST14-C GS35 fusion
[0443] SEQ ID17 Protein sequence of the human GHRP-D fusion
[0444] SEQ ID18 Protein sequence of the human IGF1-D fusion
[0445] SEQ ID19 Protein sequence of the human NGF-C fusion
[0446] SEQ ID20 Protein sequence of the human SST14-D GS20 fusion
[0447] SEQ ID21 Protein sequence of the human VIP-C fusion
[0448] SEQ ID22 Protein sequence of the human ghrelin-A fusion
[0449] SEQ ID23 Protein sequence CP-hGHRH29 N8A K12N M27L-LHD fusion
[0450] SEQ ID24 Protein sequence N-terminal-hGHRH29 N8A M27L-LHD fusion
[0451] SEQ ID25 Protein sequence of the IgA-H_{N}tet-SST14 Fusion
[0452] SEQ ID26 Protein sequence of the IgA-H_{N}tet-GHRP Fusion
[0453] SEQ ID27 Protein sequence of the human ghrelin S3W-A fusion
[0454] SEQ ID28 Protein sequence of the SST28-D fusion
[0455] SEQ ID29 Protein sequence of the GRP-D fusion
[0456] SEQ ID30 Protein sequence of the GRP-B fusion
[0457] SEQ ID31 DNA sequence of the CP-qGHRH29 linker
[0458] SEQ ID32 DNA sequence of the CP-qGHRH29-D fusion
[0459] SEQ ID33 Protein sequence of the CP-qGHRH29-D fusion
[0460] SEQ ID34 Protein sequence of the CP-qGHRH-A fusion
[0461] SEQ ID35 Protein sequence of the CP-qGHRH-C fusion
[0462] SEQ ID36 Protein sequence of the CP-qGHRH-D fusion
[0463] SEQ ID37 Protein sequence of the CP-qGHRH-D N10-PL5 fusion
[0464] SEQ ID38 Protein sequence of the CP-qGHRH-D N10-HX12 fusion
[0465] SEQ ID39 Protein sequence of the CP-SST28-D fusion
[0466] SEQ ID40 Protein sequence of the CP-SST14-D fusion
[0467] SEQ ID41 Protein sequence of the IgA-CP-SST14-H_{N}tet fusion
[0468] SEQ ID42 Protein sequence of the CP-UTS-A fusion
[0469] SEQ ID43 Protein sequence of the CP-hTGF-B GS10-NS fusion
[0470] SEQ ID44 Protein sequence of the CP-hTGF-B GS10-GS20 fusion
[0471] SEQ ID45 Protein sequence of LH_{N}/A
[0472] SEQ ID46 Protein sequence of LH_{N}/B
[0473] SEQ ID47 Protein sequence of LH_{N}/C
[0474] SEQ ID48 Protein sequence of LH_{N}/D
[0475] SEQ ID49 Protein sequence of IgA-H_{N}tet
[0476] SEQ ID50 Synthesised Octreotide peptide
[0477] SEQ ID51 Synthesised GHRH agonist peptide
[0478] SEQ ID52 Synthesised GHRH antagonist peptide
[0479] SEQ ID53 Protein sequence of the CP-MCH-D fusion
[0480] SEQ ID54 Protein sequence of the KISS-D fusion
[0481] SEQ ID55 Protein sequence of the PrRP-A fusion
[0482] SEQ ID56 Protein sequence of CP-CRH-C fusion
[0483] SEQ ID57 Protein sequence of the CP-HS_GHRH_{—}1-27-LHD fusion
[0484] SEQ ID58 Protein sequence of the CP-HS_GHRH_{—}1-28-LHD fusion
[0485] SEQ ID59 Protein sequence of the CP-HS_GHRH_{—}1-29-LHD fusion
[0486] SEQ ID60 Protein sequence of the CP-HS_GHRH_{—}1-44-LHD fusion
[0487] SEQ ID61 Protein sequence of the CP-HS_GHRH_{—}1-40-LHD fusion
[0488] SEQ ID62 Protein sequence of the CP-HS_GHRH_Ala9-LHD fusion
[0489] SEQ ID63 Protein sequence of the CP-HS_GHRH_Ala22-LHD fusion
[0490] SEQ ID64 Protein sequence CP-HS_GHRH_Ala8_Lys11_{—}1-29-LHD fusion
[0491] SEQ ID65 Protein CP-HS_GHRH_Ala8_Lys11_Arg12₋1-29-LHD fusion
[0492] SEQ ID66 Protein sequence CP-HS_GHRH_Ala8_Asn11_{—}1-29-LHD fusion
[0493] SEQ ID67 Protein sequence CP-HS_GHRH_Ala8_Lys20_{—}1-29-LHD fusion
[0494] SEQ ID68 Protein CP-HS_GHRH_Ala8_Lys11_Lys20_{—}1-29-LHD fusion
[0495] SEQ ID69 Protein sequence CP-HS_GHRH_Ala8_Asn20_{—}1-29-LHD fusion
[0496] SEQ ID70 Protein sequence CP-HS_GHRH_Ala8_Asn12_{—}1-29-LHD fusion
[0497] SEQ ID71 Protein sequence CP-HS_GHRH_Ala8_Asn21_{—}1-29-LHD fusion
[0498] SEQ ID72 Protein sequence CP-HS_GHRH_Ala8_Glu_{—}7_{—}1-29-LHD fusion
[0499] SEQ ID73 Protein sequence CP-HS_GHRH_Ala8_Glu_{—}10_{—}1-29LHD fusion
[0500] SEQ ID74 Protein CP-HS_GHRH_Ala8_Glu_{—}13_{—}1-29-LHD fusion
[0501] SEQ ID75 Protein sequence of the CP-HS_GHRH_Ala8-LHD fusion
[0502] SEQ ID76 Protein sequence of the CP-HS_GHRH_Glu8_{—}1-29-LHD fusion
[0503] SEQ ID77 Protein sequence of the CP-HS_GHRH_Ala15_{—}1-27-LHD fusion
[0504] SEQ ID78 Protein sequence of the CP-HS_GHRH_Ala15-LHD fusion
[0505] SEQ ID79 Protein sequence CP-HS_GHRH_Ala8_Ala15_{—}1-29-LHD fusion
[0506] SEQ ID80 Protein CP-HS_GHRH_Ala8_{—}9_{—}15_{—}22_{—}27-LHD fusion
[0507] SEQ ID81 Protein sequence CP-HS_GHRH_Ala8_{—}9_{—}15_{—}22-LHD fusion
[0508] SEQ ID82 Protein sequence CP-HS_GHRH_HVQAL_{—}1-32-LHD fusion
[0509] SEQ ID83 Protein sequence CP-HS_GHRH_HVSAL_{—}1-29-LHD fusion
[0510] SEQ ID84 Protein sequence CP-HS_GHRH_HVTAL_{—}1-29-LHD fusion
[0511] SEQ ID85 Protein sequence CP-HS_GHRH_QALN-LHD fusion
[0512] SEQ ID86 Protein sequence CP-HS_GHRH_QAL-LHD fusion
[0513] SEQ ID87 Protein sequence CP-hGHRH29 N8A M27L-LHD fusion

### Example 1

### Preparation of a LH_{N}/C Backbone Construct

[0514] The following procedure creates a clone for use as an expression backbone for multidomain fusion expression. This example is based on preparation of a serotype C based clone (SEQ ID3), though the procedures and methods are equally applicable to all LH_{N} serotypes such as serotype A, B and D (SEQ ID1, 2 and 4) and other protease or translocation domains such as IgA and Tetanus H_{N} (SEQ ID 5) by using the appropriate published sequence for synthesis or DNA template if creating by PCR amplification (SEQ ID5).

### Preparation of Cloning and Expression Vectors

[0515] pCR 4 (Invitrogen) is the chosen standard cloning vector chosen due to the lack of restriction sequences within the vector and adjacent sequencing primer sites for easy construct confirmation. The expression vector is based on the pET (Novagen) expression vector which has been modified to contain the multiple cloning site NdeI-BamHI-SalI-PstI-XbaI-HindIII for construct insertion, a fragment of the expression vector has been removed to create a non-mobilisable plasmid, a variety of different fusion tags have been inserted to increase purification options and an existing XbaI site in the vector backbone has been removed to simplify sub-cloning.

### Preparation of LC/C

[0516] The DNA sequence is designed by back translation of the LC/C amino acid sequence (obtained from freely available database sources such as GenBank (accession number P18640) using one of a variety of reverse translation software tools (for example Backtranslation tool v2.0 (Entelechon)). BamHI/SalI recognition sequences are incorporated at the 5′ and 3′ ends respectively of the sequence maintaining the correct reading frame. The DNA sequence is screened (using software such as SeqBuilder, DNASTAR Inc.) for restriction enzyme cleavage sequences incorporated during the back translation. Any cleavage sequences that are found to be common to those required by the cloning system are removed by the Backtranslation tool from the proposed coding sequence ensuring common E. coli codon usage is maintained. E. coli codon usage is assessed by reference to software programs such as Graphical Codon Usage Analyser (Geneart), and the % GC content and codon usage ratio assessed by reference to published codon usage tables (for example GenBank Release 143, Sep. 13, 2004). This optimised DNA sequence containing the LC/C open reading frame (ORF) is then commercially synthesized (for example by Entelechon, Geneart or Sigma-Genosys) and is provided in the pCR 4 vector.

### Preparation of H_{N}/C Insert

[0517] The DNA sequence is designed by back translation of the H_{N}/C amino acid sequence (obtained from freely available database sources such as GenBank (accession number P18640) using one of a variety of reverse translation software tools (for example Back translation tool v2.0 (Entelechon)). A PstI restriction sequence added to the N-terminus and XbaI-stop codon-HindIII to the C-terminus ensuring the correct reading frame in maintained. The DNA sequence is screened (using software such as SeqBuilder, DNASTAR Inc.) for restriction enzyme cleavage sequences incorporated during the back translation. Any sequences that are found to be common to those required by the cloning system are removed by the Backtranslation tool from the proposed coding sequence ensuring common E. coli codon usage is maintained. E. coli codon usage is assessed by reference to software programs such as Graphical Codon Usage Analyser (Geneart), and the % GC content and codon usage ratio assessed by reference to published codon usage tables (for example GenBank Release 143, Sep. 13, 2004). This optimised DNA sequence is then commercially synthesized (for example by Entelechon, Geneart or Sigma-Genosys) and is provided in the pCR 4 vector.

### Preparation of the Spacer (LC-H_{N} Linker)

[0518] The LC-HN linker can be designed from first principle, using the existing sequence information for the linker as the template. For example, the serotype C linker (in this case defined as the inter-domain polypeptide region that exists between the cysteines of the disulphide bridge between LC and HN) has the sequence HKAIDGRSLYNKTLD (SEQ ID NO: 179) containing a native Factor Xa cleavage site. This sequence information is freely available from available database sources such as GenBank (accession number P18640) or Swissprot (accession locus BXC1_CLOBO). For generation of a specific protease cleavage site, the native recognition sequence for Factor Xa can be used in the modified sequence VDAIDGRSLYNKTLQ (SEQ ID NO: 180) or an enterokinase activation site can be inserted into the activation loop to generate the sequence such as VDGIITSKTKSDDDDKNKALNLQ (SEQ ID NO: 181). Using one of a variety of reverse translation software tools (for example EditSeq best E. coli reverse translation (DNASTAR Inc.), or Backtranslation tool v2.0 (Entelechon)), the DNA sequence encoding the linker region is determined. BamHI/SalI and PstI/XbaI/stop codon/HindIII restriction enzyme sequences are incorporated at either end, in the correct reading frames. The DNA sequence is screened (using software such as MapDraw, DNASTAR Inc.) for restriction enzyme cleavage sequences incorporated during the back translation. Any sequences that are found to be common to those required by the cloning system are removed manually from the proposed coding sequence ensuring common E. coli codon usage is maintained. E. coli codon usage is assessed by reference to software programs such as Graphical Codon Usage Analyser (Geneart), and the % GC content and codon usage ratio assessed by reference to published codon usage tables (for example GenBank Release 143, Sep. 13, 2004). This optimised DNA sequence is then commercially synthesized (for example by Entelechon, Geneart or Sigma-Genosys) and is provided in the pCR 4 vector.

### Assembly and Confirmation of the Backbone Clone

[0519] Due to the small size, the activation linker must be transferred using a two step process. The pCR-4 linker vector is cleaved with BamHI+SalI combination restriction enzymes and the cleaved linker vector then serves as the recipient for BamHI+SalI restriction enzyme cleaved LC DNA. Once the LC encoding DNA is inserted upstream of the linker DNA, the entire LC-linker DNA fragment can then be isolated and transferred to the pET expression vector MCS. The LC-linker is cut out from the pCR 4 cloning vector using BamHI/PstI restriction enzymes digests. The pET expression vector is digested with the same enzymes but is also treated with antarctic phosphatase as an extra precaution to prevent re-circularisation. The LC-linker and the pET vector backbone are gel purified and the purified insert and vector backbone are ligated together using T4 DNA ligase. The product is transformed with TOP10 cells which are then screened for LC-linker using BamHI/PstI restriction digestion. The process is then repeated for the H_{N} insertion into the PstI/HindIII restriction sites of the pET-LC-linker construct.

[0520] Screening with restriction enzymes is sufficient to ensure the final backbone is correct as all components are already sequenced confirmed during synthesis. However, during the sub-cloning of some components into the backbone, where similar size fragments are being removed and inserted, sequencing of a small region to confirm correct insertion is required.

### Example 2

### Construction of LH_{N}/C-Human GHRP

[0521] The following procedure creates a clone for use as an expression construct for multidomain fusion expression where the targeting moiety (TM) is presented C-terminal to the translocation domains. This example is based on preparation of a human GHRP-C fusion (SEQ ID7), though the procedures and methods are equally applicable to create other protease, translocation and TM fusions, where the TM is C-terminal to the translocation domain.

### Preparation of Spacer-Human GHRP Insert

[0522] For presentation of an GHRP sequence at the C-terminus of the H_{N} domain, a DNA sequence is designed to flank the spacer and targeting moiety (TM) regions allowing incorporation into the backbone clone (SEQ ID3). The DNA sequence can be arranged as BamHI-SalI-PstI-XbaI-spacer-GHRP-stop codon-HindIII (SEQ ID6). The DNA sequence can be designed using one of a variety of reverse translation software tools (for example EditSeq best E. coli reverse translation (DNASTAR Inc.), or Backtranslation tool v2.0 (Entelechon)). Once the TM DNA is designed, the additional DNA required to encode the preferred spacer is created in silico. It is preferred to ensure the correct reading frame is maintained for the spacer, GHRP and restriction sequences and that the XbaI sequence is not preceded by the bases TC, which would result in DAM methylation. The DNA sequence is screened for restriction sequences incorporated and any additional sequences are removed manually from the remaining sequence ensuring common E. coli codon usage is maintained. E. coli codon usage is assessed by reference to software programs such as Graphical Codon Usage Analyser (Geneart), and the % GC content and codon usage ratio assessed by reference to published codon usage tables (for example GenBank Release 143, Sep. 13, 2004). This optimised DNA sequence is then commercially synthesized (for example by Entelechon, Geneart or Sigma-Genosys) and is provided in the pCR 4 vector.

Insertion of Spacer-Human GHRP into Backbone

[0523] In order to create a LC-linker-H_{N}-spacer-GHRP construct (SEQ ID7) using the backbone construct (SEQ ID3) and the newly synthesised pCR 4-spacer-TM vector encoding the GHRP TM (SEQ ID6) a one or two step method can be used; typically the two step method is used when the TM DNA is less than 100 base pairs. Using the one step method the GHRP can be inserted directly into the backbone construct by cutting the pCR 4-spacer-TM vector with XbaI and HindIII restriction enzymes and inserting the TM encoding DNA fragment into a similarly cut pET backbone construct. Using the two-step method the LH_{N} domain is excised from the backbone clone using restriction enzymes BamHI and XbaI and ligated into similarly digested pCR 4-spacer-GHRP vector. This creates an LH_{N}-spacer-GHRP ORF in pCR 4 that can be excised from the vector using restriction enzymes BamHI and HindIII for subsequent ligation into the similarly cleaved pET expression construct. The final construct contains the LC-linker-H_{N}-spacer-GHRP DNA (SEQ ID7) which will result in a fusion protein containing the sequence illustrated in SEQ ID8.

[0524] Screening with restriction enzymes is sufficient to ensure the final backbone is correct as all components are already sequenced confirmed, either during synthesis or following PCR amplification. However, during the sub-cloning of some components into the backbone, where similar size fragments are being removed and inserted, sequencing of a small region to confirm correct insertion is required.

### Example 3

### Expression and Purification of a LH_{N}/C-Human GHRP Fusion

[0525] This example is based on preparation of a human GHRP-C fusion containing the sequence shown in SEQ ID8, where the pET expression vector ORF also encodes a histidine purification tag. These procedures and methods are equally applicable to any C-terminally presented fusion protein of the present invention. Where appropriate, the activation enzyme should be selected to be compatible with the protease activation site within each sequence.

### Expression of LH_{N}/C-GHRP Fusion Protein

[0526] Expression of the LH_{N}/C-GHRP fusion protein is achieved using the following protocol. Inoculate 100 ml of modified TB containing 0.2% glucosamine and 30 μg/ml kanamycin in a 250 ml flask with a single colony from the LH_{N}/C-GHRP expression strain. Grow the culture at 37° C., 225 rpm for 16 hours. Inoculate 1 L of modified TB containing 0.2% glucosamine and 30 μg/ml kanamycin in a 2 L flask with 10 ml of overnight culture. Grow cultures at 37° C. until an approximate OD_{600 nm} of 0.5 is reached at which point reduce the temperature to 16° C. After 1 hour induce the cultures with 1 mM IPTG and grow at 16° C. for a further 16 hours.

### Purification of LH_{N}/C-GHRP Fusion Protein

[0527] Defrost falcon tube containing 35 ml 50 mM HEPES pH 7.2 200 mM NaCl and approximately 10 g of E. coli BL21 (DE3) cell paste. Sonicate the cell paste on ice 30 seconds on, 30 seconds off for 10 cycles at a power of 22 microns ensuring the sample remains cool. Spin the lysed cells at 18 000 rpm, 4° C. for 30 minutes. Load the supernatant onto a 0.1 M NiSO₄ charged Chelating column (20-30 ml column is sufficient) equilibrated with 50 mM HEPES pH 7.2 200 mM NaCl. Using a step gradient of 40 and 100 mM imidazole, wash away the non-specific bound protein and elute the fusion protein with 200 mM imidazole. Dialyse the eluted fusion protein against 5 L of 50 mM HEPES pH 7.2 200 mM NaCl at 4° C. overnight and measure the OD of the dialysed fusion protein. Add 10 mg of Factor Xa per 1 mg fusion protein and incubate at 25° C. static overnight. Load onto a 0.1 M NiSO₄ charged Chelating column (20-30 ml column is sufficient) equilibrated with 50 mM HEPES pH 7.2 200 mM NaCl. Wash column to baseline with 50 mM HEPES pH 7.2 200 mM NaCl. Using a step gradient of 40 and 100 mM imidazole, wash away the non-specific bound protein and elute the fusion protein with 200 mM imidazole. Dialyse the eluted fusion protein against 5 L of 50 mM HEPES pH 7.2 150 mM NaCl at 4° C. overnight and concentrate the fusion to about 2 mg/ml, aliquot sample and freeze at −20° C. Test purified protein using OD, BCA and purity analysis. FIG. 1 demonstrates the purified protein as analysed by SDS-PAGE and FIGS. 2, 4, 5 and 6 demonstrate other purified constructs using this methodology

### Example 4

### Construction of LH_{N}/D-CP-qGHRH29 Fusion Protein

[0528] The following procedure creates a clone for use as an expression construct for multidomain fusion expression where the targeting moiety (TM) is presented centrally between the protease and translocation domains. This example is based on preparation of a CP-qGHRH29-D fusion (SEQ ID33), though the procedures and methods are equally applicable to create any other CP fusion of the present invention.

### Preparation of CP-qGHRH29 Linker Insert

[0529] For presentation of an qGHRH29 sequence at the N-terminus of the H_{N} domain, a DNA sequence is designed to flank the TM with an activation protease site and spacer regions allowing incorporation into the backbone clone (SEQ ID4). The DNA sequence can be arranged as BamHI-SalI-spacer-protease activation site-qGHRH29-spacer-PstI-XbaI-stop codon-HindIII (SEQ ID31). The DNA sequence can be designed using one of a variety of reverse translation software tools (for example EditSeq best E. coli reverse translation (DNASTAR Inc.), or Backtranslation tool v2.0 (Entelechon)). Once the TM DNA is designed, the additional DNA required to encode the preferred spacer is created in silico. It is preferred to ensure the correct reading frame is maintained for the spacers, protease activation site, qGHRH29 and restriction sequences and that the XbaI sequence is not preceded by the bases TC, which would result in DAM methylation. The DNA sequence is screened for restriction sequence incorporated and any additional sequences are removed manually from the remaining sequence ensuring common E. coli codon usage is maintained. E. coli codon usage is assessed by reference to software programs such as Graphical Codon Usage Analyser (Geneart), and the % GC content and codon usage ratio assessed by reference to published codon usage tables (for example GenBank Release 143, Sep. 13, 2004). This optimised DNA sequence is then commercially synthesized (for example by Entelechon, Geneart or Sigma-Genosys) and is provided in the pCR 4 vector.

Insertion of CP-qGHRH29 Linker into Backbone

[0530] In order to create a LC-spacer-activation site-qGHRH29-spacer-H_{N} construct (SEQ ID32) using the backbone construct (SEQ ID4) and the newly synthesised pCR 4-spacer-activation site-TM-spacer vector encoding the human qGHRH29 TM (SEQ ID31), a one or two step method can be used; typically the two step method is used when the TM DNA is less than 100 base pairs. Using the one step method the qGHRH29 linker region can be inserted directly into the backbone construct buy cutting the pCR 4-spacer-activation site-TM-spacer vector with SalI and PstI restriction enzymes and inserting the TM encoding DNA fragment into a similarly cut pET backbone construct. Using the two-step method the LC domain is excised from the backbone clone using restriction enzymes BamHI and SalI and ligated into similarly digested pCR 4-spacer-activation site-TM-spacer vector. This creates a LC-spacer-activation site-qGHRH29-spacer ORF in pCR 4 that can be excised from the vector using restriction enzymes BamHI and PstI for subsequent ligation into similarly pET expression construct. The final construct contains the LC-spacer-activation site-qGHRH29-spacer-H_{N} DNA (SEQ ID32) which will result in a fusion protein containing the sequence illustrated in SEQ ID33.

[0531] Screening with restriction enzymes is sufficient to ensure the final backbone is correct as all components are already sequenced confirmed, either during synthesis or following PCR amplification. However, during the sub-cloning of some components into the backbone, where similar size fragments are being removed and inserted, sequencing of a small region to confirm correct insertion is required.

### Example 5

### Expression/Purification LH_{N}/D-CP-qGHRH29 Fusion Protein

[0532] This example is based on preparation of a LH_{N}/D-CP-qGHRH29 fusion containing the sequence shown in SEQ ID33, where the pET expression vector ORF also encodes a histidine purification tag. These procedures and methods are equally applicable to any CP fusion protein of the present invention. Where appropriate, the activation enzyme should be selected to be compatible with the protease activation site within each sequence.

### Expression of LH_{N}/D-CP-qGHRH29 Fusion Protein

[0533] Expression of the LH_{N}/D-CP-qGHRH29 fusion protein is achieved using the following protocol. Inoculate 100 ml of modified TB containing 0.2% glucosamine and 30 μg/ml kanamycin in a 250 ml flask with a single colony from the LH_{N}/D-CP-qGHRH29 expression strain. Grow the culture at 37° C., 225 rpm for 16 hours. Inoculate 1 L of modified TB containing 0.2% glucosamine and 30 μg/ml kanamycin in a 2 L flask with 10 ml of overnight culture. Grow cultures at 37° C. until an approximate OD_{600 nm} of 0.5 is reached at which point reduce the temperature to 16° C. After 1 hour induce the cultures with 1 mM IPTG and grow at 16° C. for a further 16 hours.

### Purification of LH_{N}/D-CP-qGHRH29 Fusion Protein

[0534] Defrost falcon tube containing 35 ml 50 mM HEPES pH 7.2 200 mM NaCl and approximately 10 g of E. coli BL21 (DE3) cell paste. Sonicate the cell paste on ice 30 seconds on, 30 seconds off for 10 cycles at a power of 22 microns ensuring the sample remains cool. Spin the lysed cells at 18 000 rpm, 4° C. for 30 minutes. Load the supernatant onto a 0.1 M NiSO₄ charged Chelating column (20-30 ml column is sufficient) equilibrated with 50 mM HEPES pH 7.2 200 mM NaCl. Using a step gradient of 40 and 100 mM imidazole, wash away the non-specific bound protein and elute the fusion protein with 200 mM imidazole. Dialyse the eluted fusion protein against 5 L of 50 mM HEPES pH 7.2 200 mM NaCl at 4° C. overnight and measure the OD of the dialysed fusion protein. Add 3.2 μl enterokinase (New England Biolabs) per mg fusion protein and incubate at 25° C. static overnight. Load onto a 0.1 M NiSO₄ charged Chelating column (20-30 ml column is sufficient) equilibrated with 50 mM HEPES pH 7.2 200 mM NaCl. Wash column to baseline with 50 mM HEPES pH 7.2 200 mM NaCl. Using a step gradient of 40 and 100 mM imidazole, wash away the non-specific bound protein and elute the fusion protein with 200 mM imidazole. Dialyse the eluted fusion protein against 5 L of 50 mM HEPES pH 7.2 150 mM NaCl at 4° C. overnight and concentrate the fusion to about 2 mg/ml, aliquot sample and freeze at −20° C. Test purified protein using OD, BCA and purity analysis.

### Example 6

### Chemical Conjugation of LH_{N}/A to SST TM

[0535] The following procedure creates a chemically conjugated molecule containing the LH_{N}/A amino acid sequence (SEQ ID45), prepared from SEQ ID1 using the production method outlined in example 3, and a SST Octreotide peptide which has been chemically synthesised (SEQ ID50). However, the procedures and methods are equally applicable for the conjugational preparation of any polypeptide of the present invention, for example the conjugation of TMs such as SEQ ID51 or SEQ ID52 to a protease/translocation fusion backbone such as those comprising the amino acid sequences SEQ ID45-49.

[0536] The LH_{N}/A protein was buffer exchanged from 50 mM Hepes 150 mM salt into PBSE (100 mM 14.2 g NA2HPO4, 100 mM 5.85 g NaCl, 1 mM EDTANa2 pH 7.5 with 1M HCl) using the Bio-rad PD10 column. This was done by washing one column volume of PBSE through the PD10 column, the protein was then added to the column until no more drops exit the end of the PD10 column. 8 mls of PBSE was then added and 0.5 ml fractions are collected. The collected fractions are the measured using the A₂₈₀ reading and fractions containing protein are pooled. A concentration of 1.55 mg/ml of LH_{N}/A was obtained from the buffer exchange step and this was used to set up the following reactions:

| LH_{N}/A 1.55 mg/ml | 20 mM SPDP or Sulfo-LC-SPDP |
|---|---|
| A 200 μl | 0 |
| B 200 μl | 4 fold increase 0.62 μl |
| C 200 μl | 8 fold increase 1.24 μl |

[0537] Sample were left to tumble at RT for 3 hours before being passed down another PD10 column to buffer exchange into PBSE and the protein containing fractions pooled. A final concentration of 25 Mm DTT was then added to derivatised protein and then the samples left at room temperature for 10 minutes. A₂₈₀ and A₃₄₃ readings were then taken to work out the ratio of SPDP:LH_{N}/A interaction and the reaction which resulted in a derivatisation ration of between 1 and 3 was used for the peptide conjugation. The SPDP reagent binds to the primary amines of the LH_{N}/A via an N-hydroxysuccinimide (NHS) ester, leaving the sulphydryl-reactive portion to form a disulphide bond to the free SH group on the free cysteine on the synthesised peptide. In this case the peptide sequence is Octreotide which has been synthesised with a free cysteine on the N-terminus (SEQ ID83). The SPDP-derivatised LH_{N}/A was mixed with a 4-fold excess of the Octreotide ligand and the reaction was then left at RT for 90 minutes whilst tumbling. The excess octreotide was then removed using either a PD10 column leaving LH_{N}/A-Octreotide conjugated molecule.

### Example 7

### Method for Treating Colorectal Cancer

[0538] A 59 year old man diagnosed with a stage II colorectal cancer is treated with usual chemotherapy. To improve the effects of the treatment and to prevent metastasis he receives a transphenoidal injection of a GHRH peptide TM polypeptidep of the invention (e.g. SEQ ID 9, 23-24, 33-38, 57-87). In this case, the polypeptide comprises a protease-translocation fusion backbone of the invention (e.g. BoNT/D protease and translocation domain) chemically conjugated to a GHRH peptide. Within 2 weeks a significant shrinkage of the tumour is observed without appearance of metastasis elsewhere, in correlation with a significant decrease in IGF-1 blood level. The treatment is repeated 3 months later when the IGF-1 blood level starts to rise and 4 weeks later no tumour is observable anymore with the usual detection tools (colonoscopy, CT scan, PET scan, etc.) and the level of carcinoembryonic antigen (CEA) returned to the normal.

### Example 8

### Method for Treating Breast Cancer

[0539] A 52 year old woman diagnosed with a stage II breast cancer is treated with usual chemotherapy. To improve the effects of the treatment and to prevent metastasis she receives a transphenoidal injection of a ghrelin peptide TM fusion protein of the invention (eg. SEQ ID 8, 17, 22, 26-37). Within 4 weeks a significant shrinkage of the tumour is observed without appearance of metastasis elsewhere, in correlation with a significant decrease in IGF-1 blood level. The treatment is repeated 4 months later when the IGF-1 blood level starts to rise again and 6 weeks later no tumour is observable anymore with the usual detection tools (MRI, ultrasound, breast-specific positron emission tomography, mammography, Scintigraphy, etc).

### Example 9

### Method for Treating Prostate Cancer

[0540] A 71 year old man diagnosed with a stage II prostate cancer is treated with hormone therapy. To improve the effects of the treatment and to prevent metastasis he receives an intravenous injection of a GHRH peptide TM fusion protein of the invention (e.g. SEQ ID 9, 23-24, 33-38, 57-87). Within 3 weeks a significant shrinkage of the tumour is observed without appearance of metastasis elsewhere, in correlation with a significant decrease in IGF-1 blood level. The treatment is repeated 3 months later when the IGF-1 blood level starts to rise again and 7 weeks later no tumour is observable anymore with the usual detection tools (X-ray, ProstaScint scan, MRI, transrectal ultrasonography, CT scan, etc.) and the levels of PSA came back to normal.

### Example 10

### Method for Treating Small Cell Lung Cancer

[0541] A 62 year old woman diagnosed with a stage II Small cell lung cancer is treated with usual chemotherapy. To improve the effects of the treatment and to prevent metastasis she receives a transphenoidal injection of a IGF-1 peptide TM fusion protein of the invention (eg. SEQ ID 15, 18). Within 4 weeks a significant decrease in the size of the tumour is observed without appearance of metastasis elsewhere, in correlation with a significant decrease in IGF-1 blood level. The treatment is repeated 4 months later when the IGF-1 blood level starts to rise again and 4 weeks later no tumour is observable anymore with the usual detection tools (X-rays, CT scan, bronchoscopy, etc.) or using the usual blood tests recommended for this cancer.

### Example 11

### Method for Treating Colorectal Cancer

[0542] A 53 year old man diagnosed with a stage II colorectal cancer is treated with usual chemotherapy. To improve the effects of the treatment and to prevent metastasis he receives a transphenoidal injection of a CST or SST peptide TM fusion protein of the invention (eg. SEQ ID 16, 20, 25, 28, 39-41). Within 2 weeks a significant shrinkage of the tumour is observed without appearance of metastasis elsewhere, in correlation with a significant decrease in IGF-1 blood level. The treatment is repeated 3 months later when the IGF-1 blood level starts to rise and 4 weeks later no tumour is observable anymore with the usual detection tools (colonoscopy, CT scan, PET scan, etc.) and the level of carcinoembryonic antigen (CEA) returned to the normal.

### Example 12

### Method for Treating Small Cell Lung Cancer

[0543] A 59 year old man diagnosed with a stage I Small cell lung cancer is treated with usual chemotherapy. To improve the effects of the treatment and to prevent metastasis he receives a transphenoidal injection of a urotensin peptide TM fusion protein of the invention (eg. SEQ ID 42). Within 3 weeks a significant decrease in size of the tumour is observed without appearance of metastasis elsewhere, in correlation with a significant decrease in IGF-1 blood level. The treatment is repeated 4 months later when the IGF-1 blood level starts to rise again and 5 weeks later no tumour is observable anymore with the usual detection tools (X-rays, CT scan, MRI, PET scanning, Radionuclide imaging, bronchoscopy, etc.) or using the usual blood tests recommended for this cancer.

### Example 13

### Method for Treating Prostate Cancer

[0544] A 66 year old man diagnosed with a stage IIc prostate cancer is treated with androgen deprivative treatment. To improve the effects of the treatment and to prevent metastasis he receives a intravenous injection of a CST or SST TM fusion protein of the invention (eg. SEQ ID 16, 20, 25, 28, 39-41). Within 10 days a significant shrinkage of the tumour is observed without appearance of metastasis elsewhere, in correlation with a significant decrease in IGF-1 blood level. The treatment is repeated 2 months later when the IGF-1 blood level starts to rise again and 5 weeks later no tumour is observable anymore with the usual detection tools (X-ray, ProstaScint scan, MRI, transrectal ultrasonography, CT scan, etc.) and the levels of PSA came back to normal.

### Example 14

### Method for Treating Small Cell Lung Cancer

[0545] A 60 year old woman diagnosed with a Small Cell Lung Cancer at a limited stage is treated with surgery. To improve the effects of the treatment and to prevent metastasis she receives a transphenoidal injection of a leptin peptide TM fusion protein of the invention (eg. SEQ ID 12, 14). Within 6 weeks no re-appearance of the tumour is observed, in correlation with a significant decrease in IGF-1 blood level. The treatment is repeated 4 months later when the IGF-1 blood level starts to rise again and 8 weeks later no tumour is observable anymore with the usual detection tools (X-rays, CT scan, MRI, PET scanning, Radionuclide imaging, bronchoscopy, etc.) or using the usual blood tests recommended for this cancer.

### Example 15

### Method for Treating Breast Cancer

[0546] A 62 year old woman diagnosed with a stage III breast cancer is treated with radiation. To improve the effects of the treatment and to prevent metastasis she receives a transphenoidal injection of a VIP peptide TM fusion protein of the invention (eg. SEQ ID 13, 21). Within 10 days significant shrinkage of the tumour is observed without appearance of metastasis elsewhere, in correlation with a significant decrease in IGF-1 blood level. The treatment is repeated 2 months later when the IGF-1 blood level starts to rise again and 3 weeks later no tumour is observable anymore with the usual detection tools (MRI, ultrasound, breast-specific positron emission tomography, mammography, Scintigraphy, etc).

### Example 16

### Method for Treating Colorectal Cancer

[0547] A 50 year old woman diagnosed with a stage III colorectal cancer is treated with surgery. To improve the effects of the treatment and to prevent metastasis she receives a transphenoidal injection of an ErbB peptide fusion protein of the invention (eg. SEQ ID 10). Within 8 weeks no reappearance of the tumour is observed and no appearance of metastasis elsewhere, in correlation with a significant decrease in IGF-1 blood level. The treatment is repeated 4 months later when the IGF-1 blood level starts to rise again and 8 weeks later no tumour is observable anymore with the usual detection tools (colonoscopy, CT scan, PET scan, etc.) and the level of carcinoembryonic antigen (CEA) stays normal.

### Example 17

### Method for Treating Prostate Cancer

[0548] A 67 year old man diagnosed with a stage III prostate cancer is treated with external beam radiation plus hormone therapy. To improve the effects of the treatment and to prevent metastasis he receives a transphenoidal injection of a ghrelin (GHRP) peptide TM fusion protein of the invention (eg. SEQ ID 8, 17, 22, 26-37). Within 3 weeks a significant shrinkage of the tumour is observed without appearance of metastasis elsewhere, in correlation with a significant decrease in IGF-1 blood level. The treatment is repeated 4 months later when the IGF-1 blood level starts to rise again and 7 weeks later no tumour is observable anymore with the usual detection tools (X-ray, ProstaScint scan, MRI, transrectal ultrasonography, CT scan, etc.) and the levels of PSA came back to normal.

### Example 18

### Method for Treating Small Cell Lung Cancer

[0549] A 65 year old man diagnosed with a Small Cell Lung Cancer at extensive stage cancer is treated with usual chemotherapy and radiation to treat the brain metastases. To improve the effects of the treatment and to prevent further metastasis he receives an intravenous injection of a GHRH peptide TM fusion protein of the invention (e.g. SEQ ID 9, 23-24, 33-38, 57-87). Within 4 weeks a significant shrinkage of the tumour and disappearance of the metastasis is observed without appearance of metastasis elsewhere, in correlation with a significant decrease in IGF-1 blood level. The treatment is repeated 3 months later when the IGF-1 blood level starts to rise again and 8 weeks later no tumour is observable anymore with the usual detection tools (X-rays, CT scan, MRI, PET scanning, Radionuclide imaging, bronchoscopy, etc.) or using the usual blood tests recommended for this cancer.

### Example 19

### Method for Treating Colorectal Cancer

[0550] A 66 year old man diagnosed with a stage II colorectal cancer is treated with surgery. To improve the effects of the treatment and to prevent metastasis he receives a transphenoidal injection of an IGF-1 peptide TM fusion protein of the invention (eg. SEQ ID 15, 18). In the next three months no reappearance of the tumour is observed and no metastasis can be detected elsewhere, this is in correlation with a significant decrease in IGF-1 blood level. The treatment is repeated 4 months later when the IGF-1 blood level starts to rise again and 6 months later no tumour is observable with the usual detection tools (colonoscopy, CT scan, PET scan, etc.) and the level of carcinoembryonic antigen (CEA) stays normal.

### Example 20

### Method for Treating Breast Cancer

[0551] A 54 year old woman diagnosed with a stage IIIb breast cancer is treated with neoadjuvant chemotherapy. To improve the effects of the treatment and to prevent metastasis she receives a transphenoidal injection of am ErbB peptide TM fusion protein of the invention (eg. SEQ ID 10). Within 2 weeks a significant shrinkage of the tumour is observed without appearance of metastasis elsewhere, in correlation with a significant decrease in IGF-1 blood level. She is then submitted to a modified radical mastectomy is with reconstruction. 3 months later when the IGF-1 blood level starts to raise again, a new injection is realized and 8 months later no tumour is observable anymore with the usual detection tools (MRI, ultrasound, breast-specific positron emission tomography, mammography, etc).

### Example 21

### Method for Treating Colorectal Cancer

[0552] A 62 year old woman diagnosed with a stage IV colorectal cancer (3 metastasis observed in the liver) is treated with chemotherapy, by injection in liver arteries. To improve the effects of the treatment and to prevent metastasis elsewhere she receives a transphenoidal injection of a bombesin (GRP) peptide TM fusion protein of the invention (eg. SEQ ID 29-30). Within 2 weeks a significant shrinkage of the tumour and the metastasis is observed without appearance of metastasis elsewhere, in correlation with a significant decrease in IGF-1 blood level. Surgery is then realized to remove the tumour and the metatastasis, at the same time. The treatment with the fusion protein is repeated 4 months later when the IGF-1 blood level starts to rise again and 9 months later no tumour is observable anymore with the usual detection tools (colonoscopy, CT scan, PET scan, etc.) and the level of carcinoembryonic antigen (CEA) stays normal.

### Example 22

### Method for Treating Prostate Cancer

[0553] A 73 year old man diagnosed with a stage III prostate cancer is treated with hormone therapy. To improve the effects of the treatment and to prevent metastasis he receives a transphenoidal injection of a VIP peptide TM fusion protein of the invention (eg. SEQ ID 13, 21). Within 6 weeks a significant shrinkage of the tumour is observed without appearance of metastasis elsewhere, in correlation with a significant decrease in IGF-1 blood level. The treatment is repeated 3 months later when the IGF-1 blood level starts to rise again and 5 months later no tumour is observable anymore with the usual detection tools (X-ray, ProstaScint scan, MRI, transrectal ultrasonography, CT scan, etc.) and the levels of PSA came back to normal.

### Example 23

### Method for Treating Breast Cancer

[0554] A 48 year old woman diagnosed with a stage IIIa breast cancer is treated with neoadjuvant chemotherapy. To improve the effects of the treatment and to prevent metastasis she receives a transphenoidal injection of an NGF peptide TM fusion protein of the invention (eg. SEQ ID 11, 19). Within 8 weeks a significant shrinkage of the tumour is observed without appearance of metastasis elsewhere, in correlation with a significant decrease in IGF-1 blood level. A radical mastectomy is then realized with reconstruction. The injection of the fusion protein is repeated 3 months later when the IGF-1 blood level starts to rise again and 8 months later no tumour is observable anymore with the usual detection tools (MRI, ultrasound, breast-specific positron emission tomography, mammography, etc).

### Example 24

### Method for Treating Small Cell Lung Cancer

[0555] A 58 year old man diagnosed with a limited stage Small Cell Lung Cancer cancer is treated with chemotherapy with radiation therapy. To improve the effects of the treatments and to prevent metastasis to appear elsewhere, he receives a transphenoidal injection of a CST or SST peptide TM fusion protein of the invention (eg. SEQ ID 16, 20, 25, 28, 39-41). Within 3 weeks a significant shrinkage of the tumour is observed without appearance of metastasis elsewhere, in correlation with a significant decrease in IGF-1 blood level. The treatment is repeated 3 months later when the IGF-1 blood level starts to rise again and 7 months later no tumour is observable anymore with the usual detection tools (X-rays, CT scan, MRI, PET scanning, Radionuclide imaging, bronchoscopy, etc.) or using the usual blood tests recommended for this cancer.

### Example 25

### Method for Treating Colorectal Cancer

[0556] A 75 year old man diagnosed with a stage II colorectal tumour receives a intravenous injection of a GHRH peptide TM fusion protein of the invention (e.g. SEQ ID 9, 23-24, 33-38, 57-87). Within 2 weeks a significant shrinkage of the tumour is observed without appearance of metastasis elsewhere, in correlation with a significant decrease in IGF-1 blood level. The patient goes then through surgery to remove the tumour. The treatment is repeated 4 months later when the IGF-1 blood level starts to rise again and 8 months later no tumour is observable anymore with the usual detection tools (colonoscopy, CT scan, PET scan, etc.) and the level of carcinoembryonic antigen (CEA) stays normal.

### Example 26

### Method for Treating Prostate Cancer

[0557] A 66 year old man diagnosed with a stage II prostate cancer is treated with brachytherapy and external beam radiation combined. To improve the effects of the treatments and to prevent metastasis he receives a transphenoidal injection of an ErbB peptide TM fusion protein of the invention (eg. SEQ ID 10). Within 5 weeks a significant shrinkage of the tumour is observed without appearance of metastasis elsewhere, in correlation with a significant decrease in IGF-1 blood level. The treatment is repeated 3 months later when the IGF-1 blood level starts to rise again and 6 months later no tumour is observable anymore with the usual detection tools (X-ray, ProstaScint scan, MRI, transrectal ultrasonography, CT scan, etc.) and the levels of PSA came back to normal.

### Example 27

### Method for Treating Breast Cancer

[0558] A 51 year old woman diagnosed with a stage II breast cancer is treated with adjuvant therapies: hormone therapy, chemotherapy, and trastuzumab. To improve the effects of the treatment and to prevent metastasis she receives a transphenoidal injection of a VIP peptide TM fusion protein of the invention (eg. SEQ ID 13, 21). Within 2 weeks a significant shrinkage of the tumour is observed without appearance of metastasis elsewhere, in correlation with a significant decrease in IGF-1 blood level. The treatment is repeated 2 months later when the IGF-1 blood level starts to rise again and 6 months later no tumour is observable anymore with the usual detection tools (MRI, ultrasound, breast-specific positron emission tomography, mammography, etc).

### Example 28

### Method for Treating Small Cell Lung Cancer

[0559] A 56 year old man diagnosed with a Small Cell Lung Cancer at an extensive stage is treated with chemotherapy and radiation therapy. To improve the effects of the treatments and to prevent metastasis elsewhere he receives a transphenoidal injection of a ghrelin peptide TM fusion protein of the invention (eg. SEQ ID 8, 17, 22, 26-37). Within 3 weeks a significant shrinkage of the tumour and a diminution in size of the metastasis is observed without appearance of new metastasis elsewhere, in correlation with a significant decrease in IGF-1 blood level. The treatment is repeated twice after 2 months and 5 months, when the IGF-1 blood level starts to rise again. The patients died 11 months later, 6 months later than expected with this type of treatment and this stage of the disease.

### Example 29

### Binding, Secretion and In Vivo Assays

[0560] To determine the efficacy of the polypeptide fusions we have confirmed their ability to bind appropriate receptors, decrease GH secretion in vivo and in vitro, and to decrease tumour growth in vivo. The following assays are exemplified with GHRH fusion proteins

### A) Binding Assay:

[0561] Primary pituitary cells cultures are established from 6-8 week old male wistar rats. The neurointermediate lobes are dissected out and the remaining tissue is cut into small pieces and transferred to isolation buffer. Cells are then cultured in 24-well plates for 48 hours prior to preparation for the assay.

[0562] Using a rapid and sensitive radiometric Scintillation Proximity Assay (SPA) the binding affinity of the GHRH fusion protein is evaluated. In this regard, we incubate rat GHRH membrane fractions with SPA beads and ¹²⁵I-labelled GHRH in assay buffer. An 8-points IC₅₀ displacement assay is then realized using various concentrations from 10⁻¹² to 10⁻⁶M of the GHRH-fusion protein to be tested.

### 8) Secretion Assay:

[0563] Using MtT/S cells known to express the GHRH receptor and to secrete Growth Hormone we demonstrate the potency of the GHRH constructs on GH secretion. After 48 h with 10⁻⁸M corticosterone to induce the differentiation of the MtT/S cells, the culture medium is replaced by a culture medium containing 10 nM of the GHRH-fusion-protein (LHnD and double-inactivated LHnD as a control). After 48 h, the MtT/S cells are submitted to a secretion assay using 10 μM forskolin, or 40 mM KCl or 10⁻⁸M GHRH. An example of this type of secretion assay is presented on FIG. 3 using various LHn to determine their efficiency to decrease Growth Hormone from MtT/S cells.

### C) In Vivo Assay:

[0564] The GHRH-fusion-proteins (FIGS. 4 and 5) are tested in a xenograft model of cancer using colorectal cell lines: Caco 2, HT 29, SW 837, or SW 480 transplanted in 4-6 weeks old athymic nude (Nu/Nu) mice. The mice are injected with 0.5×10⁷ cells. The tumour size is measured by digital calliper twice a week and tumour volumes are estimated according to the formula for an ellipse (short dimension)²×(long dimension)/2. When the xenografts reach ˜70, ˜150, or ˜150 mm3, the mice are then randomized to receive (PBS) or the GHRH-fusion-proteins (the active one or the double inactivated version) and the tumours are harvested 4 days after the beginning of the treatment. Mice are injected with BrdU 2 h prior to sacrifice. BrdU only incorporates in the DNA of dividing cells when they are in S-phase and is then a specific marker of cell proliferation. IGF-1 level is assessed by collecting the blood through cardiac puncture under isoflurane anaesthesia, allowed to clot for 1 h at room temperature and serum collected after centrifugation. IGF-1 is analyzed by ELISA according to the manufacturer's instructions. The final size of the tumours is measured and compared, per groups (treated with fusion-proteins: active or not, or untreated) and compared to the IGF-1 levels measured.

### Conclusion:

[0565] These data confirm that targeting the GH/IGF-1 axis is a valid approach to treating cancer. By decreasing the level of GH/IGF-1 it is possible to decrease the proliferation of the IGF-1 dependent tumours, and thus we can slow down the progression of these deadly cancers.

### Example 30

### Method for Treating Non-Small Cell Lung Cancer

[0566] A 52 year old male non-smoker diagnosed with a stage II adenocarcinoma, non-small cell lung cancer and undergoing radiotherapy following surgical removal of the tumour is given a transphenoidal injection of a GHRH peptide TM fusion protein of the invention (e.g. SEQ ID 9, 23-24, 33-38, 57-87). Within 4 weeks a significant decrease in the size of the tumour is observed without appearance of metastasis elsewhere, in correlation with a significant decrease in IGF-1 blood level. Radiation therapy is discontinued at this point and tumour size does not increase and there are no metastasis observed. Treatment with the fusion protein is repeated 3 months later when the IGF-1 blood level starts to rise again and tumour size remains stable with no metastasis over the next 3 months without any additional intervention being required.

### Example 31

### Method for Treating Non-Small Cell Lung Cancer

[0567] A 60 year old female smoker diagnosed with a stage IV undifferentiated large cell carcinoma, with metastases in the liver and bone undergoing chemotherapy and radiotherapy is given a transphenoidal injection of an IGF-1 peptide TM fusion protein of the invention (eg. SEQ ID 15, 18). Within 4 weeks blood tests for alkaline phosphatase and alanine aminotransferase indicate reduced tissue damage within the bone and liver indicating reduction in the metatstatic cancer. Bone scans also reveal a reduction in the bone metastase. Disease progression is slowed and at 4 months survival the patient is given a further treatment of the fusion protein.

### Example 32

### Method for Treating Non-Small Cell Lung Cancer

[0568] A 54 year old male smoker diagnosed with a stage I squamous cell carcinoma in the bronchi of the central chest area is given a transphenoidal injection of a GHRH peptide TM fusion protein of the invention (e.g. SEQ ID 9, 23-24, 33-38, 57-87). Within 5 weeks a significant shrinkage of the tumour is observed without appearance of metastasis elsewhere, in correlation with a significant decrease in IGF-1 blood level. The treatment is repeated 5 months later when the IGF-1 blood level starts to rise again and 4 months later no tumour is observable with the usual detection tools (X-rays, CT scan, MRI, PET scanning, Radionuclide imaging, bronchoscopy, etc.) or using the usual blood tests recommended for this cancer.

### Example 33

### Method for Treating Breast Cancer

[0569] A 50 year old woman diagnosed with a stage IIIa breast cancer is treated with neoadjuvant chemotherapy. To improve the effects of the treatment and to prevent metastasis she receives a corticotropin-releasing factor receptor 1 binding peptide TM fusion of the invention (eg. SEQ ID 56). Within 8 weeks a significant shrinkage of the tumour is observed without appearance of metastasis elsewhere, in correlation with a significant decrease in IGF-1 blood level. A radical mastectomy is then realized with reconstruction. The injection of the fusion protein is repeated 3 months later when the IGF-1 blood level starts to rise again and 8 months later no tumour is observable anymore with the usual detection tools (MRI, ultrasound, breast-specific positron emission tomography, mammography, etc).

### Example 34

### Method for Treating Small Cell Lung Cancer

[0570] A 60 year old man diagnosed with a limited stage Small Cell Lung Cancer cancer is treated with chemotherapy with radiation therapy. To improve the effects of the treatments and to prevent metastasis to appear elsewhere, he receives a transphenoidal injection of a KiSS-10 or KiSS-54 peptide TM fusion of the invention (eg. SEQ ID 54). Within 3 weeks a significant shrinkage of the tumour is observed without appearance of metastasis elsewhere, in correlation with a significant decrease in IGF-1 blood level. The treatment is repeated 3 months later when the IGF-1 blood level starts to rise again and 7 months later no tumour is observable anymore with the usual detection tools (X-rays, CT scan, MRI, PET scanning, Radionuclide imaging, bronchoscopy, etc.) or using the usual blood tests recommended for this cancer.

### Example 35

### Method for Treating Colorectal Cancer

[0571] A 70 year old man diagnosed with a stage II colorectal tumour receives a intravenous injection of a melanin-concentrating hormone peptide TM fusion of the invention (eg. SEQ ID 53). Within 2 weeks a significant shrinkage of the tumour is observed without appearance of metastasis elsewhere, in correlation with a significant decrease in IGF-1 blood level. The patient goes then through surgery to remove the tumour. The treatment is repeated 4 months later when the IGF-1 blood level starts to rise again and 8 months later no tumour is observable anymore with the usual detection tools (colonoscopy, CT scan, PET scan, etc.) and the level of carcinoembryonic antigen (CEA) stays normal.

### Example 36

### Method for Treating Prostate Cancer

[0572] A 40 year old man diagnosed with a stage II prostate cancer is treated with brachytherapy and external beam radiation combined. To improve the effects of the treatments and to prevent metastasis he receives a transphenoidal injection of a prolactin-releasing peptide TM fusion of the invention (eg. SEQ ID 55). Within 5 weeks a significant shrinkage of the tumour is observed without appearance of metastasis elsewhere, in correlation with a significant decrease in IGF-1 blood level. The treatment is repeated 3 months later when the IGF-1 blood level starts to rise again and 6 months later no tumour is observable anymore with the usual detection tools (X-ray, ProstaScint scan, MRI, transrectal ultrasonography, CT scan, etc.) and the levels of PSA came back to normal.

### Example 37

### Activity of CP-GHRH-LHD on Rat IGF-1 Levels In Vivo

[0573] Aims—to assess the impact of i.v. adminisation of CP-GHRH-LHD fusion on IGF-1 levels in rats five days after treatment compared with vehicle only treated control.

### Materials and Methods

[0574] Animals: Adult male Sprague-Dawley rats maintained under standard housing conditions with lights on at 05.00 h (14L:10D), food and water available ad libitum and habituated to housing conditions for at least 1 week prior to surgery.

[0575] Surgery: On day 1 of the study rats (200-250 g) will be anaesthetised with a combination of Hypnorm (0.32 mg/kg fentanyl citrate and 10 mg/kg fluanisone, i.m.) and diazepam (2.6 mg/kg i.p.). The right jugular vein is exposed and a silastic tipped (i.d. 0.50 mm, o.d. 0.93 mm) polythene cannula (Portex, UK) inserted into the vessel until it lies close to the entrance of the right atrium. Cannulae will be prefilled with heparinised (10 IU/ml) isotonic saline. The free end of the cannulae will be exteriorised through a scalp incision and then tunnelled through a protective spring anchored to the skull using two stainless steel screws and self-curing dental acrylic. Following recovery animals are housed in individual cages in the automated blood sampling room. The end of the protective spring is attached to a mechanical swivel that allows the animal maximum freedom of movement. Cannulae are flushed daily with heparinised saline to maintain patency.

[0576] Treatment: At 09:00 on day 2 of the study rats will receive in i.v. injection of CP-GHRH-LHD or vehicle only control.

[0577] Sampling: The automated blood-sampling system (ABS) has been previously described (Clark et al., 1986; Windle et al., 1997). Three to four days after surgery the jugular vein cannula of each animal will be connected to the automated blood-sampling system. At 07:00 on day 6 sampling will begin. Blood samples will be collected at 10 minute intervals using the automated system for a 24 hour period. A total of 144 blood samples will be collected for each will contain no more than 38 μl of whole blood.

### Results

[0578] The IGF-1 levels were measure using an IGF-1 ELISA kit. FIG. 7 illustrates a statistically significant reduction in the IGF-1 levels in the fusion treated rats compared to the vehicle only control with a t-test P value=0.0416 after only five days.

### Example 38

### Activity of CP-GHRH-LHD on Rat IGF-1 Levels In Vivo

[0579] Aims—to investigate the activity time course for CP-GHRH-LHD fusion identifying the time delay between administration and initial effect of the compound in IGF-1 levels.

### Materials and Methods:

[0580] Animals: Adult male Sprague-Dawley rats maintained under standard housing conditions with lights on at 05.00 h (14L:10D), food and water available ad libitum and habituated to housing conditions for at least 1 week prior to surgery.

[0581] Surgery: On day 1 of the study rats (260-280 g) will be anaesthetised with a combination of Hypnorm and diazepam. The right jugular vein is then exposed and a silastic tipped (i.d. 0.50 mm, o.d. 0.93 mm) polythene cannula (Portex, UK) inserted into the vessel until it lies close to the entrance of the right. Cannulae will be prefilled with heparinised (10 IU/ml) isotonic saline. The free end of the cannulae will be exteriorised through a scalp incision and passed through a spring anchored to the skull using stainless steel screws and dental cement. Following recovery animals will be housed in individual cages in the ABS room. The spring will be attached to a swivel that allows the animal maximum freedom of movement. Cannulae will be flushed daily with heparinised saline to maintain patency.

[0582] Treatment: At 10:00 h on day 5 of the study rats will receive in i.v. injection of the CP-GHRH-LHD or vehicle (sterile saline).

[0583] Blood sampling: After flushing the cannulae a single manual blood sample (100 μl) will be taken from each rat at 09.30 h. Samples will be taken from day 5 to day 18 of the experiment (or until the cannulae block). Plasma from blood samples will be stored at −20C for later analysis of IGF-1 content by ELISA kit.

### Results

[0584] FIG. 8 illustrates a statistically significant reduction in the IGF-1 levels in the fusion treated rats compared to the vehicle only control from day four after treatment.

### Example 39

### Activity of CP-GHRH-LHD on Rat GH Levels In Vivo

[0585] Aims—to assess the impact of i.v. adminisation of CP-GHRH-LHD fusion on growth hormone levels in rats five days after treatment compared with vehicle only treated and Octreotide infusion controls.

### Materials and Methods

[0586] Animals: Adult male Sprague-Dawley rats maintained under standard housing conditions with lights on at 05.00 h (14L:10D), food and water available ad libitum and habituated to housing conditions for at least 1 week prior to surgery.

[0587] Surgery: On day 1 of the study rats (200-250 g) will be anaesthetised with a combination of Hypnorm (0.32 mg/kg fentanyl citrate and 10 mg/kg fluanisone, i.m.) and diazepam (2.6 mg/kg i.p.). The right jugular vein is exposed and a silastic tipped (i.d. 0.50 mm, o.d. 0.93 mm) polythene cannula (Portex, UK) inserted into the vessel until it lies close to the entrance of the right atrium. Cannulae will be prefilled with heparinised (10 IU/ml) isotonic saline. The free end of the cannulae will be exteriorised through a scalp incision and then tunnelled through a protective spring anchored to the skull using two stainless steel screws and self-curing dental acrylic. Following recovery animals are housed in individual cages in the automated blood sampling room. The end of the protective spring is attached to a mechanical swivel that allows the animal maximum freedom of movement. Cannulae are flushed daily with heparinised saline to maintain patency.

[0588] Treatment: At 09:00 on day 2 of the study rats will receive in i.v. injection of the Syntaxin active compound or vehicle. A 12 hour infusion of somatostatin (or an analogue) will begin 6 hours after the start of sampling (administered via one of the dual cannulae lines) and will continue for 12 hours only. [This infusion timing should be an excellent GH assay control as we should see baseline secretion then complete inhibition and then rapid recovery/rebound]

[0589] Sampling: The automated blood-sampling system (ABS) has been previously described (Clark et al., 1986; Windle et al., 1997). Three to four days after surgery the jugular vein cannula of each animal will be connected to the automated blood-sampling system. At 07:00 on day 6 sampling will begin. Blood samples will be collected at 10 minute intervals using the automated system for a 24 hour period. A total of 144 blood samples will be collected for each will contain no more than 38 μl of whole blood.

### Results

[0590] The growth hormone levels were measure using an RIA assay. FIG. 9a illustrates the vehical treated animals which show typical pulsatile release of growth hormone, FIG. 9b illustrates the complete ablation of the pulsatile growth hormone release after treatment with GHRH-LHD chimera and FIG. 9c shows the blocking of the pulsatile growth hormone release and subsequent recovery when the Octreotide infusion is stopped.

### Sequence Listing

SEQ ID1 LH_{N}A
ggatccatggagttcgttaacaaacagttcaactataaagacccagttaacggtgttgacattgcttacatcaaaatcccgaacgctggc
cagatgcagccggtaaaggcattcaaaatccacaacaaaatctgggttatcccggaacgtgatacctttactaacccggaagaaggtg
acctgaacccgccaccggaagcgaaacaggtgccggtatcttactatgactccacctacctgtctaccgataacgaaaaggacaacta
cctgaaaggtgttactaaactgttcgagcgtatttactccaccgacctgggccgtatgctgctgactagcatcgttcgcggtatcccgttctg
gggcggttctaccatcgataccgaactgaaagtaatcgacactaactgcatcaacgttattcagccggacggttcctatcgttccgaaga
actgaacctggtgatcatcggcccgtctgctgatatcatccagttcgagtgtaagagctttggtcacgaagttctgaacctcacccgtaacg
gctacggttccactcagtacatccgtttctctccggacttcaccttcggttttgaagaatccctggaagtagacacgaacccactgctgggc
gctggtaaattcgcaactgatcctgcggttaccctggctcacgaactgattcatgcaggccaccgcctgtacggtatcgccatcaatccga
accgtgtcttcaaagttaacaccaacgcgtattacgagatgtccggtctggaagttagcttcgaagaactgcgtacttttggcggtcacga
cgctaaattcatcgactctctgcaagaaaacgagttccgtctgtactactataacaagttcaaagatatcgcatccaccctgaacaaagc
gaaatccatcgtgggtaccactgcttctctccagtacatgaagaacgtttttaaagaaaaatacctgctcagcgaagacacctccggcaa
attctctgtagacaagttgaaattcgataaactttacaaaatgctgactgaaatttacaccgaagacaacttcgttaagttctttaaagttctg
aaccgcaaaacctatctgaacttcgacaaggcagtattcaaaatcaacatcgtgccgaaagttaactacactatctacgatggtttcaac
ctgcgtaacaccaacctggctgctaattttaacggccagaacacggaaatcaacaacatgaacttcacaaaactgaaaaacttcactg
gtctgttcgagttttacaagctgctgtgcGTCGACGGCATCATTACCTCCAAAACTAAATCTGACGATGACGA
TAAAAACAAAGCGCTGAACCTGCAGtgtatcaaggttaacaactgggatttattcttcagcccgagtgaagacaacttca
ccaacgacctgaacaaaggtgaagaaatcacctcagatactaacatcgaagcagccgaagaaaacatctcgctggacctgatccag
cagtactacctgacctttaatttcgacaacgagccggaaaacatttctatcgaaaacctgagctctgatatcatcggccagctggaactga
tgccgaacatcgaacgtttcccaaacggtaaaaagtacgagctggacaaatataccatgttccactacctgcgcgcgcaggaatttgaa
cacggcaaatcccgtatcgcactgactaactccgttaacgaagctctgctcaacccgtcccgtgtatacaccttcttctctagcgactacgt
gaaaaaggtcaacaaagcgactgaagctgcaatgttcttgggttgggttgaacagcttgtttatgattttaccgacgagacgtccgaagta
tctactaccgacaaaattgcggatatcactatcatcatcccgtacatcggtccggctctgaacattggcaacatgctgtacaaagacgact
tcgttggcgcactgatcttctccggtgcggtgatcctgctggagttcatcccggaaatcgccatcccggtactgggcacctttgctctggtttct
tacattgcaaacaaggttctgactgtacaaaccatcgacaacgcgctgagcaaacgtaacgaaaaatgggatgaagtttacaaatata
tcgtgaccaactggctggctaaggttaatactcagatcgacctcatccgcaaaaaaatgaaagaagcactggaaaaccaggcggaa
gctaccaaggcaatcattaactaccagtacaaccagtacaccgaggaagaaaaaaacaacatcaacttcaacatcgacgatctgtcc
tctaaactgaacgaatccatcaacaaagctatgatcaacatcaacaagttcctgaaccagtgctctgtaagctatctgatgaactccatga
tcccgtacggtgttaaacgtctggaggacttcgatgcgtctctgaaagacgccctgctgaaatacatttacgacaaccgtggcactctgat
cggtcaggttgatcgtctgaaggacaaagtgaacaataccttatcgaccgacatcccttttcagctcagtaaatatgtcgataaccaacgc
cttttgtccactctagaataatgaaagctt
SEQ ID2 LH_{N}B
ggatccatgccggttaccatcaacaacttcaactacaacgacccgatcgacaacaacaacatcattatgatggaaccgccgttcgcac
gtggtaccggacgttactacaaggcttttaagatcaccgaccgtatctggatcatcccggaacgttacaccttcggttacaaacctgagga
cttcaacaagagtagcgggattttcaatcgtgacgtctgcgagtactatgatccagattatctgaataccaacgataagaagaacatattc
cttcagactatgattaaactcttcaaccgtatcaaaagcaaaccgctcggtgaaaaactcctcgaaatgattatcaacggtatcccgtacc
tcggtgaccgtcgtgtcccgcttgaagagttcaacaccaacatcgcaagcgtcaccgtcaacaaactcatcagcaacccaggtgaagt
cgaacgtaaaaaaggtatcttcgcaaacctcatcatcttcggtccgggtccggtcctcaacgaaaacgaaaccatcgacatcggtatcc
agaaccacttcgcaagccgtgaaggtttcggtggtatcatgcagatgaaattctgcccggaatacgtcagtgtcttcaacaacgtccagg
aaaacaaaggtgcaagcatcttcaaccgtcgtggttacttcagcgacccggcactcatcctcatgcatgaactcatccacgtcctccacg
gtctctacggtatcaaagttgacgacctcccgatcgtcccgaacgagaagaaattcttcatgcagagcaccgacgcaatccaggctga
ggaactctacaccttcggtggccaagacccaagtatcataaccccgtccaccgacaaaagcatctacgacaaagtcctccagaacttc
aggggtatcgtggacagactcaacaaagtcctcgtctgcatcagcgacccgaacatcaatatcaacatatacaagaacaagttcaaa
gacaagtacaaattcgtcgaggacagcgaaggcaaatacagcatcgacgtagaaagtttcgacaagctctacaaaagcctcatgttc
ggtttcaccgaaaccaacatcgccgagaactacaagatcaagacaagggcaagttacttcagcgacagcctcccgcctgtcaaaatc
aagaacctcttagacaacgagatttacacaattgaagagggcttcaacatcagtgacaaagacatggagaaggaatacagaggtca
gaacaaggctatcaacaaacaggcatacgaggagatcagcaaagaacacctcgcagtctacaagatccagatgtgcgtcgacgaa
gaaaagctgtacgacgacgacgacaaagaccgttggggttcttcgctgcagtgcatcgacgttgacaacgaagacctgttcttcatcgct
gacaaaaacagcttcagtgacgacctgagcaaaaacgaacgtatcgaatacaacacccagagcaactacatcgaaaacgacttcc
cgatcaacgaactgatcctggacaccgacctgataagtaaaatcgaactgccgagcgaaaacaccgaaagtctgaccgacttcaac
gttgacgttccggtttacgaaaaacagccggctatcaagaaaatcttcaccgacgaaaacaccatcttccagtacctgtacagccagac
cttcccgctggacatccgtgacatcagtctgaccagcagtttcgacgacgctctgctgttcagcaacaaagtttacagtttcttcagcatgg
actacatcaaaaccgctaacaaagttgttgaagcagggctgttcgctggttgggttaaacagatcgttaacgacttcgttatcgaagctaa
caaaagcaacactatggacgcaatcgctgacatcagtctgatcgttccgtacatcggtctggctctgaacgttggtaacgaaaccgctaa
aggtaactttgaaaacgctttcgagatcgctggtgcaagcatcctgctggagttcatcccggaactgctgatcccggttgttggtgctttcctg
ctggaaagttacatcgacaacaaaaacaagatcatcaaaaccatcgacaacgctctgaccaaacgtaacgaaaaatggagtgatat
gtacggtctgatcgttgctcagtggctgagcaccgtcaacacccagttctacaccatcaaagaaggtatgtacaaagctctgaactacca
ggctcaggctctggaagagatcatcaaataccgttacaacatctacagtgagaaggaaaagagtaacatcaacatcgacttcaacga
catcaacagcaaactgaacgaaggtatcaaccaggctatcgacaacatcaacaacttcatcaacggttgcagtgttagctacctgatga
agaagatgatcccgctggctgttgaaaaactgctggacttcgacaacaccctgaaaaagaacctgctgaactacatcgacgaaaaca
agctgtacctgatcggtagtgctgaatacgaaaaaagtaaagtgaacaaatacctgaagaccatcatgccgttcgacctgagtatctac
accaacgacaccatcctgatcgaaatgttcaacaaatacaactctctagaataatgaaagctt
SEQ ID3 LH_{N}C
ggatccatgccgatcaccatcaacaacttcaactacagcgatccggtggataacaaaaacatcctgtacctggatacccatctgaatac
cctggcgaacgaaccggaaaaagcgtttcgtatcaccggcaacatttgggttattccggatcgttttagccgtaacagcaacccgaatct
gaataaaccgccgcgtgttaccagcccgaaaagcggttattacgatccgaactatctgagcaccgatagcgataaagataccttcctga
aagaaatcatcaaactgttcaaacgcatcaacagccgtgaaattggcgaagaactgatctatcgcctgagcaccgatattccgtttccgg
gcaacaacaacaccccgatcaacacctttgatttcgatgtggatttcaacagcgttgatgttaaaacccgccagggtaacaattgggtga
aaaccggcagcattaacccaagcgtgattattaccggtccgcgcgaaaacattattgatccggaaaccagcacctttaaactgaccaa
caacacctttgcggcgcaggaaggttttggcgcgctgagcattattagcattagcccgcgctttatgctgacctatagcaacgcgaccaa
cgatgttggtgaaggccgtttcagcaaaagcgaattttgcatggacccgatcctgatcctgatgcatgaactgaaccatgcgatgcataa
cctgtatggcatcgcgattccgaacgatcagaccattagcagcgtgaccagcaacatcttttacagccagtacaacgtgaaactggaat
atgcggaaatctatgcgtttggcggtccgaccattgatctgattccgaaaagcgcgcgcaaatacttcgaagaaaaagcgctggattact
atcgcagcattgcgaaacgtctgaacagcattaccaccgcgaatccgagcagcttcaacaaatatatcggcgaatataaacagaaact
gatccgcaaatatcgctttgtggtggaaagcagcggcgaagttaccgttaaccgcaataaattcgtggaactgtacaacgaactgaccc
agatcttcaccgaatttaactatgcgaaaatctataacgtgcagaaccgtaaaatctacctgagcaacgtgtataccccggtgaccgcga
atattctggatgataacgtgtacgatatccagaacggctttaacatcccgaaaagcaacctgaacgttctgtttatgggccagaacctgag
ccgtaatccggcgctgcgtaaagtgaacccggaaaacatgctgtacctgttcaccaaattttgcgtcgacgcgattgatggtcgtagcctg
tacaacaaaaccctgcagtgtcgtgaactgctggtgaaaaacaccgatctgccgtttattggcgatatcagcgatgtgaaaaccgatatc
ttcctgcgcaaagatatcaacgaagaaaccgaagtgatctactacccggataacgtgagcgttgatcaggtgatcctgagcaaaaaca
ccagcgaacatggtcagctggatctgctgtatccgagcattgatagcgaaagcgaaattctgccgggcgaaaaccaggtgttttacgat
aaccgtacccagaacgtggattacctgaacagctattactacctggaaagccagaaactgagcgataacgtggaagattttacctttac
ccgcagcattgaagaagcgctggataacagcgcgaaagtttacacctattttccgaccctggcgaacaaagttaatgcgggtgttcagg
gcggtctgtttctgatgtgggcgaacgatgtggtggaagatttcaccaccaacatcctgcgtaaagataccctggataaaatcagcgatgt
tagcgcgattattccgtatattggtccggcgctgaacattagcaatagcgtgcgtcgtggcaattttaccgaagcgtttgcggttaccggtgt
gaccattctgctggaagcgtttccggaatttaccattccggcgctgggtgcgtttgtgatctatagcaaagtgcaggaacgcaacgaaatc
atcaaaaccatcgataactgcctggaacagcgtattaaacgctggaaagatagctatgaatggatgatgggcacctggctgagccgtat
tatcacccagttcaacaacatcagctaccagatgtacgatagcctgaactatcaggcgggtgcgattaaagcgaaaatcgatctggaat
acaaaaaatacagcggcagcgataaagaaaacatcaaaagccaggttgaaaacctgaaaaacagcctggatgtgaaaattagcg
aagcgatgaataacatcaacaaattcatccgcgaatgcagcgtgacctacctgttcaaaaacatgctgccgaaagtgatcgatgaact
gaacgaatttgatcgcaacaccaaagcgaaactgatcaacctgatcgatagccacaacattattctggtgggcgaagtggataaactg
aaagcgaaagttaacaacagcttccagaacaccatcccgtttaacatcttcagctataccaacaacagcctgctgaaagatatcatcaa
cgaatacttcaatctagactaataagctt
SEQ ID4 LH_{N}D
ggatccatgacgtggccagttaaggatttcaactactcagatcctgtaaatgacaacgatattctgtaccttcgcattccacaaaataaact
gatcaccacaccagtcaaagcattcatgattactcaaaacatttgggtcattccagaacgcttttctagtgacacaaatccgagtttatctaa
acctccgcgtccgacgtccaaatatcagagctattacgatccctcatatctcagtacggacgaacaaaaagatactttccttaaaggtatc
attaaactgtttaagcgtattaatgagcgcgatatcgggaaaaagttgattaattatcttgttgtgggttccccgttcatgggcgatagctctac
ccccgaagacacttttgattttacccgtcatacgacaaacatcgcggtagagaagtttgagaacggatcgtggaaagtcacaaacatca
ttacacctagcgtcttaatttttggtccgctgccaaacatcttagattatacagccagcctgactttgcaggggcaacagtcgaatccgagttt
cgaaggttttggtaccctgagcattctgaaagttgccccggaatttctgctcactttttcagatgtcaccagcaaccagagctcagcagtatt
aggaaagtcaattttttgcatggacccggttattgcactgatgcacgaactgacgcactctctgcatcaactgtatgggatcaacatcccca
gtgacaaacgtattcgtccccaggtgtctgaaggatttttctcacaggatgggccgaacgtccagttcgaagagttgtatactttcggaggc
ctggacgtagagatcattccccagattgagcgcagtcagctgcgtgagaaggcattgggccattataaggatattgcaaaacgcctgaa
taacattaacaaaacgattccatcttcgtggatctcgaatattgataaatataagaaaatttttagcgagaaatataattttgataaagataat
acaggtaactttgtggttaacattgacaaattcaactccctttacagtgatttgacgaatgtaatgagcgaagttgtgtatagttcccaataca
acgttaagaatcgtacccattacttctctcgtcactacctgccggttttcgcgaacatccttgacgataatatttacactattcgtgacggctt
taacttgaccaacaagggcttcaatattgaaaattcaggccagaacattgaacgcaacccggccttgcagaaactgtcgagtgaatccgt
ggttgacctgtttaccaaagtctgcgtcgacaaaagcgaagagaagctgtacgatgacgatgacaaagatcgttggggatcgtccctgc
agtgtattaaagtgaaaaacaatcggctgccttatgtagcagataaagatagcattagtcaggagattttcgaaaataaaattatcactga
cgaaaccaatgttcagaattattcagataaattttcactggacgaaagcatcttagatggccaagttccgattaacccggaaattgttgatc
cgttactgccgaacgtgaatatggaaccgttaaacctccctggcgaagagatcgtattttatgatgacattacgaaatatgtggactacctt
aattcttattactatttggaaagccagaaactgtccaataacgtggaaaacattactctgaccacaagcgtggaagaggctttaggctact
caaataagatttataccttcctcccgtcgctggcggaaaaagtaaataaaggtgtgcaggctggtctgttcctcaactgggcgaatgaagt
tgtcgaagactttaccacgaatattatgaaaaaggataccctggataaaatctccgacgtctcggttattatcccatatattggccctgcgtt
aaatatcggtaatagtgcgctgcgggggaattttaaccaggcctttgctaccgcgggcgtcgcgttcctcctggagggctttcctgaatttac
tatcccggcgctcggtgtttttacattttactcttccatccaggagcgtgagaaaattatcaaaaccatcgaaaactgcctggagcagcggg
tgaaacgctggaaagattcttatcaatggatggtgtcaaactggttatctcgcatcacgacccaattcaaccatattaattaccagatgtatg
atagtctgtcgtaccaagctgacgccattaaagccaaaattgatctggaatataaaaagtactctggtagcgataaggagaacatcaaa
agccaggtggagaaccttaagaatagtctggatgtgaaaatctctgaagctatgaataacattaacaaattcattcgtgaatgttcggtga
cgtacctgttcaagaatatgctgccaaaagttattgatgaactgaataaatttgatctgcgtaccaaaaccgaacttatcaacctcatcgac
tcccacaacattatccttgtgggcgaagtggatcgtctgaaggccaaagtaaacgagagctttgaaaatacgatgccgtttaatattttttca
tataccaataactccttgctgaaagatatcatcaatgaatatttcaatctagaataataagctt
SEQ ID5 IgA-H_{N}tet
ggatccATGGAGTCCAATCAGCCGGAAAAAAATGGAACCGCGACTAAACCCGAGAATTCGGGG
AACACTACGTCGGAAAACGGCCAGACGGAACCTGAGAAGAAACTGGAACTACGAAATGTGT
CCGATATCGAGCTATACTCTCAAACCAATGGAACCTATAGGCAGCATGTTTCATTGGACGGA
ATCCCAGAAAATACGGATACATATTTCGTCAAAGTGAAGTCTAGCGCATTCAAGGATGTATAT
ATCCCCGTTGCGAGTATTACAGAAGAGAAGCGGAACGGTCAAAGCGTTTATAAGATTACAGC
AAAGGCCGAAAAGTTACAACAGGAGTTAGAAAACAAATACGTTGACAATTTCACTTTTTATCT
CGATAAAAAGGCTAAAGAGGAAAACACGAACTTCACGTCATTTAGTAATCTGGTCAAAGCCA
TAAATCAAAATCCATCTGGTACATACCATCTCGCGGCAAGTCTAAACGCGAATGAAGTAGAA
CTTGGCCCGGACGAGCGTTCATACATTAAGGATACCTTTACTGGCAGACTCATAGGGGAAAA
AGACGGTAAGAACTATGCTATATACAATTTGAAAAAGCCTTTATTTGAGAACCTGTCGGGCG
CCACCGTCGAGAAATTGTCCCTTAAAAACGTAGCTATAAGCGGAAAGAATGACATCGGTAGT
CTTGCAAACGAGGCTACTAACGGGACAAAGATTAAACAAGTGCACGTAGATGGGtgtgtcgacgg
catcattacctccaaaactaaatctgacgatgacgataaaaacaaagcgctgaacctgcagtgcattaaaataaagaatgaggatttg
acattcatcgcagaaaaaaatagcttcagcgaagagccgttccaagatgagatagtaagctacaacaccaagaacaagccgcttaat
tttaattactcgttagataaaatcatagttgactacaaccttcaatcgaagatcacgttaccgaatgacagaacaactcctgtcacaaaag
gaattccctatgcacctgagtataagtcaaatgccgcgtcaacaatagagattcataatatagatgacaacaccatctatcaatatctgta
cgctcagaaaagtccaacaactcttcagcgtataacaatgaccaatagtgtcgatgacgcattgataaattctaccaagatatactcttatt
tcccgagcgtcatctccaaagttaatcaaggtgctcaaggcattctatttttgcaatgggtccgagacatcatagatgacttcactaatgagt
cgtctcagaaaaccacgattgataaaatatcagatgtttccaccatcgtcccctacatcggacctgcgcttaacattgtgaagcaggggta
tgaggggaattttatcggagcgttagaaactacgggggttgtgctattacttgaatacataccagagataacattgcccgttatagcggcc
ctcagtatcgcagaatcaagtacacaaaaagaaaagataatcaaaacaatcgacaacttcctagaaaagaggtacgaaaaatggat
agaggtttataaactcgtgaaagcgaaatggttaggcactgttaatacgcagttccaaaagagatcctatcaaatgtatagatcactgga
gtaccaggtggatgccataaagaaaattatcgactatgaatataaaatatattcaggtccagataaggagcagatagctgatgaaataa
acaatttaaaaaacaaacttgaagagaaggcgaataaggccatgatcaatatcaatatttttatgcgagaatcttcacgatcttttttggtaa
atcagatgattaacgaagccaaaaagcagctgcttgagttcgacacacagtccaaaaacatactaatgcaatatatcaaagcaaactc
aaaattcattggaattactgagctgaagaaactggaatccaaaataaataaagtattctctaccccgatcccgttctcttactctaaaaacc
ttgactgctgggtagataacgaagaagatattgacgttctagagtaataagctt
SEQ ID6 GHRP linker
Catatgccggttggatccatccaggtcgactttaaactgcagggtgttactctagagggcggtggcggtagcggtggcggtggcagcgg
cggtggcggtagcgcactagtgggcagctcatttctgtctccggaacatcaacgggtgcagcagcgtaaagagagtaaaaagccgcc
agcgaaattacagcctcgctaatagaagcttaagggcgaattc
SEQ ID7 GHRP-C fusion
catatgccggttggatccatgccgatcaccatcaacaacttcaactacagcgatccggtggataacaaaaacatcctgtacctggatac
ccatctgaataccctggcgaacgaaccggaaaaagcgtttcgtatcaccggcaacatttgggttattccggatcgttttagccgtaacagc
aacccgaatctgaataaaccgccgcgtgttaccagcccgaaaagcggttattacgatccgaactatctgagcaccgatagcgataaag
ataccttcctgaaagaaatcatcaaactgttcaaacgcatcaacagccgtgaaattggcgaagaactgatctatcgcctgagcaccgat
attccgtttccgggcaacaacaacaccccgatcaacacctttgatttcgatgtggatttcaacagcgttgatgttaaaacccgccagggta
acaattgggtgaaaaccggcagcattaacccgagcgtgattattaccggtccgcgcgaaaacattattgatccggaaaccagcaccttt
aaactgaccaacaacacctttgcggcgcaggaaggttttggcgcgctgagcattattagcattagcccgcgctttatgctgacctatagca
acgcgaccaacgatgttggtgaaggccgtttcagcaaaagcgaattttgcatggacccgatcctgatcctgatgcatgaactgaaccat
gcgatgcataacctgtatggcatcgcgattccgaacgatcagaccattagcagcgtgaccagcaacatcttttacagccagtacaacgt
gaaactggaatatgcggaaatctatgcgtttggcggtccgaccattgatctgattccgaaaagcgcgcgcaaatacttcgaagaaaaag
cgctggattactatcgcagcattgcgaaacgtctgaacagcattaccaccgcgaatccgagcagcttcaacaaatatatcggcgaatat
aaacagaaactgatccgcaaatatcgctttgtggtggaaagcagcggcgaagttaccgttaaccgcaataaattcgtggaactgtacaa
cgaactgacccagatcttcaccgaatttaactatgcgaaaatctataacgtgcagaaccgtaaaatctacctgagcaacgtgtatacccc
ggtgaccgcgaatattctggatgataacgtgtacgatatccagaacggctttaacatcccgaaaagcaacctgaacgttctgtttatgggc
cagaacctgagccgtaatccggcgctgcgtaaagtgaacccggaaaacatgctgtacctgttcaccaaattttgcgtcgacgcgattgat
ggtcgtagcctgtacaacaaaaccctgcagtgtcgtgaactgctggtgaaaaacaccgatctgccgtttattggcgatatcagcgatgtg
aaaaccgatatcttcctgcgcaaagatatcaacgaagaaaccgaagtgatctactacccggataacgtgagcgttgatcaggtgatcct
gagcaaaaacaccagcgaacatggtcagctggatctgctgtatccgagcattgatagcgaaagcgaaattctgccgggcgaaaacc
aggtgttttacgataaccgtacccagaacgtggattacctgaacagctattactacctggaaagccagaaactgagcgataacgtggaa
gattttacctttacccgcagcattgaagaagcgctggataacagcgcgaaagtttacacctattttccgaccctggcgaacaaagttaatg
cgggtgttcagggcggtctgtttctgatgtgggcgaacgatgtggtggaagatttcaccaccaacatcctgcgtaaagataccctggataa
aatcagcgatgttagcgcgattattccgtatattggtccggcgctgaacattagcaatagcgtgcgtcgtggcaattttaccgaagcgtttgc
ggttaccggtgtgaccattctgctggaagcgtttccggaatttaccattccggcgctgggtgcgtttgtgatctatagcaaagtgcaggaac
gcaacgaaatcatcaaaaccatcgataactgcctggaacagcgtattaaacgctggaaagatagctatgaatggatgatgggcacctg
gctgagccgtattatcacccagttcaacaacatcagctaccagatgtacgatagcctgaactatcaggcgggtgcgattaaagcgaaa
atcgatctggaatacaaaaaatacagcggcagcgataaagaaaacatcaaaagccaggttgaaaacctgaaaaacagcctggatg
tgaaaattagcgaagcgatgaataacatcaacaaattcatccgcgaatgcagcgtgacctacctgttcaaaaacatgctgccgaaagt
gatcgatgaactgaacgaatttgatcgcaacaccaaagcgaaactgatcaacctgatcgatagccacaacattattctggtgggcgaa
gtggataaactgaaagcgaaagttaacaacagcttccagaacaccatcccgtttaacatcttcagctataccaacaacagcctgctgaa
agatatcatcaacgaatacttcaatctagagggcggtggcggtagcggtggcggtggcagcggcggtggcggtagcgcactagtggg
cagctcatttctgtctccggaacatcaacgggtgcagcagcgtaaagagagtaaaaagccgccagcgaaattacagcctcgctaatag
aagcttaagggcgaattc
SEQ ID8 GHRP-C fusion
PITINNFNYSDPVDNKNILYLDTHLNTLANEPEKAFRITGNIWVIPDRFSRNSNPNLNKPPRVTSPK
SGYYDPNYLSTDSDKDTFLKEIIKLFKRINSREIGEELIYRLSTDIPFPGNNNTPINTFDFDVDFNSV
DVKTRQGNNWVKTGSINPSVIITGPRENIIDPETSTFKLTNNTFAAQEGFGALSIISISPRFMLTYSN
ATNDVGEGRFSKSEFCMDPILILMHELNHAMHNLYGIAIPNDQTISSVTSNIFYSQYNVKLEYAEIY
AFGGPTIDLIPKSARKYFEEKALDYYRSIAKRLNSITTANPSSFNKYIGEYKQKLIRKYRFVVESSG
EVTVNRNKFVELYNELTQIFTEFNYAKIYNVQNRKIYLSNVYTPVTANILDDNVYDIQNGFNIPKSN
LNVLFMGQNLSRNPALRKVNPENMLYLFTKFCVDAIDGRSLYNKTLQCRELLVKNTDLPFIGDISD
VKTDIFLRKDINEETEVIYYPDNVSVDQVILSKNTSEHGQLDLLYPSIDSESEILPGENQVFYDNRT
QNVDYLNSYYYLESQKLSDNVEDFTFTRSIEEALDNSAKVYTYFPTLANKVNAGVQGGLFLMWA
NDVVEDFTTNILRKDTLDKISDVSAIIPYIGPALNISNSVRRGNFTEAFAVTGVTILLEAFPEFTIPAL
GAFVIYSKVQERNEIIKTIDNCLEQRIKRWKDSYEWMMGTWLSRIITQFNNISYQMYDSLNYQAG
AIKAKIDLEYKKYSGSDKENIKSQVENLKNSLDVKISEAMNNINKFIRECSVTYLFKNMLPKVIDELN
EFDRNTKAKLINLIDSHNIILVGEVDKLKAKVNNSFQNTIPFNIFSYTNNSLLKDIINEYFNLEGGGG
SGGGGSGGGGSALVGSSFLSPEHQRVQQRKESKKPPAKLQPR
SEQ ID9 GHRH-D fusion
TWPVKDFNYSDPVNDNDILYLRIPQNKLITTPVKAFMITQNIWVIPERFSSDTNPSLSKPPRPTSKY
QSYYDPSYLSTDEQKDTFLKGIIKLFKRINERDIGKKLINYLVVGSPFMGDSSTPEDTFDFTRHTTN
IAVEKFENGSWKVTNIITPSVLIFGPLPNILDYTASLTLQGQQSNPSFEGFGTLSILKVAPEFLLTFS
DVTSNQSSAVLGKSIFCMDPVIALMHELTHSLHQLYGINIPSDKRIRPQVSEGFFSQDGPNVQFE
ELYTFGGLDVEIIPQIERSQLREKALGHYKDIAKRLNNINKTIPSSWISNIDKYKKIFSEKYNFDKDN
TGNFVVNIDKFNSLYSDLTNVMSEVVYSSQYNVKNRTHYFSRHYLPVFANILDDNIYTIRDGFNLT
NKGFNIENSGQNIERNPALQKLSSESVVDLFTKVCVDKSEEKLYDDDDKDRWGSSLQCIKVKNN
RLPYVADKDSISQEIFENKIITDETNVQNYSDKFSLDESILDGQVPINPEIVDPLLPNVNMEPLNLPG
EEIVFYDDITKYVDYLNSYYYLESQKLSNNVENITLTTSVEEALGYSNKIYTFLPSLAEKVNKGVQA
GLFLNWANEVVEDFTTNIMKKDTLDKISDVSVIIPYIGPALNIGNSALRGNFNQAFATAGVAFLLEG
FPEFTIPALGVFTFYSSIQEREKIIKTIENCLEQRVKRWKDSYQWMVSNWLSRITTQFNHINYQMY
DSLSYQADAIKAKIDLEYKKYSGSDKENIKSQVENLKNSLDVKISEAMNNINKFIRECSVTYLFKNM
LPKVIDELNKFDLRTKTELINLIDSHNIILVGEVDRLKAKVNESFENTMPFNIFSYTNNSLLKDIINEY
FNLEGGGGSGGGGSGGGGSALVYADAIFTNSYRKVLGQLSARKLLQDIMSRQQGESNQERGA
SEQ ID10 EGF-D fusion
TWPVKDFNYSDPVNDNDILYLRIPQNKLITTPVKAFMITQNIWVIPERFSSDTNPSLSKPPRPTSKY
QSYYDPSYLSTDEQKDTFLKGIIKLFKRINERDIGKKLINYLVVGSPFMGDSSTPEDTFDFTRHTTN
IAVEKFENGSWKVTNIITPSVLIFGPLPNILDYTASLTLQGQQSNPSFEGFGTLSILKVAPEFLLTFS
DVTSNQSSAVLGKSIFCMDPVIALMHELTHSLHQLYGINIPSDKRIRPQVSEGFFSQDGPNVQFE
ELYTFGGLDVEIIPQIERSQLREKALGHYKDIAKRLNNINKTIPSSWISNIDKYKKIFSEKYNFDKDN
TGNFVVNIDKFNSLYSDLTNVMSEVVYSSQYNVKNRTHYFSRHYLPVFANILDDNIYTIRDGFNLT
NKGFNIENSGQNIERNPALQKLSSESVVDLFTKVCVDKSEEKLYDDDDKDRWGSSLQCIKVKNN
RLPYVADKDSISQEIFENKIITDETNVQNYSDKFSLDESILDGQVPINPEIVDPLLPNVNMEPLNLPG
EEIVFYDDITKYVDYLNSYYYLESQKLSNNVENITLTTSVEEALGYSNKIYTFLPSLAEKVNKGVQA
GLFLNWANEVVEDFTTNIMKKDTLDKISDVSVIIPYIGPALNIGNSALRGNFNQAFATAGVAFLLEG
FPEFTIPALGVFTFYSSIQEREKIIKTIENCLEQRVKRWKDSYQWMVSNWLSRITTQFNHINYQMY
DSLSYQADAIKAKIDLEYKKYSGSDKENIKSQVENLKNSLDVKISEAMNNINKFIRECSVTYLFKNM
LPKVIDELNKFDLRTKTELINLIDSHNIILVGEVDRLKAKVNESFENTMPFNIFSYTNNSLLKDIINEY
FNLEGGGGSGGGGSGGGGSALVNSDSECPLSHDGYCLHDGVCMYIEALDKYACNCVVGYIGE
RCQYRDLKWWELR
SEQ ID11 NGF-D fusion
[sequence omitted]
SEQ ID12 LEP116-122-D fusion
TWPVKDFNYSDPVNDNDILYLRIPQNKLITTPVKAFMITQNIWVIPERFSSDTNPSLSKPPRPTSKY
QSYYDPSYLSTDEQKDTFLKGIIKLFKRINERDIGKKLINYLVVGSPFMGDSSTPEDTFDFTRHTTN
IAVEKFENGSWKVTNIITPSVLIFGPLPNILDYTASLTLQGQQSNPSFEGFGTLSILKVAPEFLLTFS
DVTSNQSSAVLGKSIFCMDPVIALMHELTHSLHQLYGINIPSDKRIRPQVSEGFFSQDGPNVQFE
ELYTFGGLDVEIIPQIERSQLREKALGHYKDIAKRLNNINKTIPSSWISNIDKYKKIFSEKYNFDKDN
TGNFVVNIDKFNSLYSDLTNVMSEVVYSSQYNVKNRTHYFSRHYLPVFANILDDNIYTIRDGFNLT
NKGFNIENSGQNIERNPALQKLSSESVVDLFTKVCVDKSEEKLYDDDDKDRWGSSLQCIKVKNN
RLPYVADKDSISQEIFENKIITDETNVQNYSDKFSLDESILDGQVPINPEIVDPLLPNVNMEPLNLPG
EEIVFYDDITKYVDYLNSYYYLESQKLSNNVENITLTTSVEEALGYSNKIYTFLPSLAEKVNKGVQA
GLFLNWANEVVEDFTTNIMKKDTLDKISDVSVIIPYIGPALNIGNSALRGNFNQAFATAGVAFLLEG
FPEFTIPALGVFTFYSSIQEREKIIKTIENCLEQRVKRWKDSYQWMVSNWLSRITTQFNHINYQMY
DSLSYQADAIKAKIDLEYKKYSGSDKENIKSQVENLKNSLDVKISEAMNNINKFIRECSVTYLFKNM
LPKVIDELNKFDLRTKTELINLIDSHNIILVGEVDRLKAKVNESFENTMPFNIFSYTNNSLLKDIINEY
FNLEGGGGSGGGGSGGGGSALVSCHLPWA
SEQ ID13 VIP-D fusion
TWPVKDFNYSDPVNDNDILYLRIPQNKLITTPVKAFMITQNIWVIPERFSSDTNPSLSKPPRPTSKY
QSYYDPSYLSTDEQKDTFLKGIIKLFKRINERDIGKKLINYLVVGSPFMGDSSTPEDTFDFTRHTTN
IAVEKFENGSWKVTNIITPSVLIFGPLPNILDYTASLTLQGQQSNPSFEGFGTLSILKVAPEFLLTFS
DVTSNQSSAVLGKSIFCMDPVIALMHELTHSLHQLYGINIPSDKRIRPQVSEGFFSQDGPNVQFE
ELYTFGGLDVEIIPQIERSQLREKALGHYKDIAKRLNNINKTIPSSWISNIDKYKKIFSEKYNFDKDN
TGNFVVNIDKFNSLYSDLTNVMSEVVYSSQYNVKNRTHYFSRHYLPVFANILDDNIYTIRDGFNLT
NKGFNIENSGQNIERNPALQKLSSESVVDLFTKVCVDKSEEKLYDDDDKDRWGSSLQCIKVKNN
RLPYVADKDSISQEIFENKIITDETNVQNYSDKFSLDESILDGQVPINPEIVDPLLPNVNMEPLNLPG
EEIVFYDDITKYVDYLNSYYYLESQKLSNNVENITLTTSVEEALGYSNKIYTFLPSLAEKVNKGVQA
GLFLNWANEVVEDFTTNIMKKDTLDKISDVSVIIPYIGPALNIGNSALRGNFNQAFATAGVAFLLEG
FPEFTIPALGVFTFYSSIQEREKIIKTIENCLEQRVKRWKDSYQWMVSNWLSRITTQFNHINYQMY
DSLSYQADAIKAKIDLEYKKYSGSDKENIKSQVENLKNSLDVKISEAMNNINKFIRECSVTYLFKNM
LPKVIDELNKFDLRTKTELINLIDSHNIILVGEVDRLKAKVNESFENTMPFNIFSYTNNSLLKDIINEY
FNLEGGGGSGGGGSGGGGSALVHSDAVFTDNYTRLRKQMAVKKYLNSILN
SEQ ID14 LEP116-122-C fusion
PITINNFNYSDPVDNKNILYLDTHLNTLANEPEKAFRITGNIWVIPDRFSRNSNPNLNKPPRVTSPK
SGYYDPNYLSTDSDKDTFLKEIIKLFKRINSREIGEELIYRLSTDIPFPGNNNTPINTFDFDVDFNSV
DVKTRQGNNWVKTGSINPSVIITGPRENIIDPETSTFKLTNNTFAAQEGFGALSIISISPRFMLTYSN
ATNDVGEGRFSKSEFCMDPILILMHELNHAMHNLYGIAIPNDQTISSVTSNIFYSQYNVKLEYAEIY
AFGGPTIDLIPKSARKYFEEKALDYYRSIAKRLNSITTANPSSFNKYIGEYKQKLIRKYRFVVESSG
EVTVNRNKFVELYNELTQIFTEFNYAKIYNVQNRKIYLSNVYTPVTANILDDNVYDIQNGFNIPKSN
LNVLFMGQNLSRNPALRKVNPENMLYLFTKFCVDAIDGRSLYNKTLQCRELLVKNTDLPFIGDISD
VKTDIFLRKDINEETEVIYYPDNVSVDQVILSKNTSEHGQLDLLYPSIDSESEILPGENQVFYDNRT
QNVDYLNSYYYLESQKLSDNVEDFTFTRSIEEALDNSAKVYTYFPTLANKVNAGVQGGLFLMWA
NDVVEDFTTNILRKDTLDKISDVSAIIPYIGPALNISNSVRRGNFTEAFAVTGVTILLEAFPEFTIPAL
GAFVIYSKVQERNEIIKTIDNCLEQRIKRWKDSYEWMMGTWLSRIITQFNNISYQMYDSLNYQAG
AIKAKIDLEYKKYSGSDKENIKSQVENLKNSLDVKISEAMNNINKFIRECSVTYLFKNMLPKVIDELN
EFDRNTKAKLINLIDSHNIILVGEVDKLKAKVNNSFQNTIPFNIFSYTNNSLLKDIINEYFNLEGGGG
SGGGGSGGGGSALVSCHLPWA
SEQ ID15 IGF1-C fusion
PITINNFNYSDPVDNKNILYLDTHLNTLANEPEKAFRITGNIWVIPDRFSRNSNPNLNKPPRVTSPK
SGYYDPNYLSTDSDKDTFLKEIIKLFKRINSREIGEELIYRLSTDIPFPGNNNTPINTFDFDVDFNSV
DVKTRQGNNWVKTGSINPSVIITGPRENIIDPETSTFKLTNNTFAAQEGFGALSIISISPRFMLTYSN
ATNDVGEGRFSKSEFCMDPILILMHELNHAMHNLYGIAIPNDQTISSVTSNIFYSQYNVKLEYAEIY
AFGGPTIDLIPKSARKYFEEKALDYYRSIAKRLNSITTANPSSFNKYIGEYKQKLIRKYRFVVESSG
EVTVNRNKFVELYNELTQIFTEFNYAKIYNVQNRKIYLSNVYTPVTANILDDNVYDIQNGFNIPKSN
LNVLFMGQNLSRNPALRKVNPENMLYLFTKFCVDAIDGRSLYNKTLQCRELLVKNTDLPFIGDISD
VKTDIFLRKDINEETEVIYYPDNVSVDQVILSKNTSEHGQLDLLYPSIDSESEILPGENQVFYDNRT
QNVDYLNSYYYLESQKLSDNVEDFTFTRSIEEALDNSAKVYTYFPTLANKVNAGVQGGLFLMWA
NDVVEDFTTNILRKDTLDKISDVSAIIPYIGPALNISNSVRRGNFTEAFAVTGVTILLEAFPEFTIPAL
GAFVIYSKVQERNEIIKTIDNCLEQRIKRWKDSYEWMMGTWLSRIITQFNNISYQMYDSLNYQAG
AIKAKIDLEYKKYSGSDKENIKSQVENLKNSLDVKISEAMNNINKFIRECSVTYLFKNMLPKVIDELN
EFDRNTKAKLINLIDSHNIILVGEVDKLKAKVNNSFQNTIPFNIFSYTNNSLLKDIINEYFNLEGGGG
SGGGGSGGGGSALVGPETLCGAELVDALQFVCGDRGFYFNKPTGYGSSSRRAPQTGIVDECC
FRSCDLRRLEMYCAPLKPAKSA
SEQ ID16 SST-C fusion
PITINNFNYSDPVDNKNILYLDTHLNTLANEPEKAFRITGNIWVIPDRFSRNSNPNLNKPPRVTSPK
SGYYDPNYLSTDSDKDTFLKEIIKLFKRINSREIGEELIYRLSTDIPFPGNNNTPINTFDFDVDFNSV
DVKTRQGNNWVKTGSINPSVIITGPRENIIDPETSTFKLTNNTFAAQEGFGALSIISISPRFMLTYSN
ATNDVGEGRFSKSEFCMDPILILMHELNHAMHNLYGIAIPNDQTISSVTSNIFYSQYNVKLEYAEIY
AFGGPTIDLIPKSARKYFEEKALDYYRSIAKRLNSITTANPSSFNKYIGEYKQKLIRKYRFVVESSG
EVTVNRNKFVELYNELTQIFTEFNYAKIYNVQNRKIYLSNVYTPVTANILDDNVYDIQNGFNIPKSN
LNVLFMGQNLSRNPALRKVNPENMLYLFTKFCVDAIDGRSLYNKTLQCRELLVKNTDLPFIGDISD
VKTDIFLRKDINEETEVIYYPDNVSVDQVILSKNTSEHGQLDLLYPSIDSESEILPGENQVFYDNRT
QNVDYLNSYYYLESQKLSDNVEDFTFTRSIEEALDNSAKVYTYFPTLANKVNAGVQGGLFLMWA
NDVVEDFTTNILRKDTLDKISDVSAIIPYIGPALNISNSVRRGNFTEAFAVTGVTILLEAFPEFTIPAL
GAFVIYSKVQERNEIIKTIDNCLEQRIKRWKDSYEWMMGTWLSRIITQFNNISYQMYDSLNYQAG
AIKAKIDLEYKKYSGSDKENIKSQVENLKNSLDVKISEAMNNINKFIRECSVTYLFKNMLPKVIDELN
EFDRNTKAKLINLIDSHNIILVGEVDKLKAKVNNSFQNTIPFNIFSYTNNSLLKDIINEYFNLEGGGG
SGGGGSGGGGSGGGGSGGGGSGGGGSGGGGSALVAGCKNFFWKTFTSC
SEQ ID17 GHRP-D fusion
TWPVKDFNYSDPVNDNDILYLRIPQNKLITTPVKAFMITQNIWVIPERFSSDTNPSLSKPPRPTSKY
QSYYDPSYLSTDEQKDTFLKGIIKLFKRINERDIGKKLINYLVVGSPFMGDSSTPEDTFDFTRHTTN
IAVEKFENGSWKVTNIITPSVLIFGPLPNILDYTASLTLQGQQSNPSFEGFGTLSILKVAPEFLLTFS
DVTSNQSSAVLGKSIFCMDPVIALMHELTHSLHQLYGINIPSDKRIRPQVSEGFFSQDGPNVQFE
ELYTFGGLDVEIIPQIERSQLREKALGHYKDIAKRLNNINKTIPSSWISNIDKYKKIFSEKYNFDKDN
TGNFVVNIDKFNSLYSDLTNVMSEVVYSSQYNVKNRTHYFSRHYLPVFANILDDNIYTIRDGFNLT
NKGFNIENSGQNIERNPALQKLSSESVVDLFTKVCVDKSEEKLYDDDDKDRWGSSLQCIKVKNN
RLPYVADKDSISQEIFENKIITDETNVQNYSDKFSLDESILDGQVPINPEIVDPLLPNVNMEPLNLPG
EEIVFYDDITKYVDYLNSYYYLESQKLSNNVENITLTTSVEEALGYSNKIYTFLPSLAEKVNKGVQA
GLFLNWANEVVEDFTTNIMKKDTLDKISDVSVIIPYIGPALNIGNSALRGNFNQAFATAGVAFLLEG
FPEFTIPALGVFTFYSSIQEREKIIKTIENCLEQRVKRWKDSYQWMVSNWLSRITTQFNHINYQMY
DSLSYQADAIKAKIDLEYKKYSGSDKENIKSQVENLKNSLDVKISEAMNNINKFIRECSVTYLFKNM
LPKVIDELNKFDLRTKTELINLIDSHNIILVGEVDRLKAKVNESFENTMPFNIFSYTNNSLLKDIINEY
FNLEGGGGSGGGGSGGGGSALVGSSFLSPEHQRVQQRKESKKPPAKLQPR
SEQ ID18 IGF1-D fusion
TWPVKDFNYSDPVNDNDILYLRIPQNKLITTPVKAFMITQNIWVIPERFSSDTNPSLSKPPRPTSKY
QSYYDPSYLSTDEQKDTFLKGIIKLFKRINERDIGKKLINYLVVGSPFMGDSSTPEDTFDFTRHTTN
IAVEKFENGSWKVTNIITPSVLIFGPLPNILDYTASLTLQGQQSNPSFEGFGTLSILKVAPEFLLTFS
DVTSNQSSAVLGKSIFCMDPVIALMHELTHSLHQLYGINIPSDKRIRPQVSEGFFSQDGPNVQFE
ELYTFGGLDVEIIPQIERSQLREKALGHYKDIAKRLNNINKTIPSSWISNIDKYKKIFSEKYNFDKDN
TGNFVVNIDKFNSLYSDLTNVMSEVVYSSQYNVKNRTHYFSRHYLPVFANILDDNIYTIRDGFNLT
NKGFNIENSGQNIERNPALQKLSSESVVDLFTKVCVDKSEEKLYDDDDKDRWGSSLQCIKVKNN
RLPYVADKDSISQEIFENKIITDETNVQNYSDKFSLDESILDGQVPINPEIVDPLLPNVNMEPLNLPG
EEIVFYDDITKYVDYLNSYYYLESQKLSNNVENITLTTSVEEALGYSNKIYTFLPSLAEKVNKGVQA
GLFLNWANEVVEDFTTNIMKKDTLDKISDVSVIIPYIGPALNIGNSALRGNFNQAFATAGVAFLLEG
FPEFTIPALGVFTFYSSIQEREKIIKTIENCLEQRVKRWKDSYQWMVSNWLSRITTQFNHINYQMY
DSLSYQADAIKAKIDLEYKKYSGSDKENIKSQVENLKNSLDVKISEAMNNINKFIRECSVTYLFKNM
LPKVIDELNKFDLRTKTELINLIDSHNIILVGEVDRLKAKVNESFENTMPFNIFSYTNNSLLKDIINEY
FNLEGGGGSGGGGSGGGGSALVGPETLCGAELVDALQFVCGDRGFYFNKPTGYGSSSRRAPQ
TGIVDECCFRSCDLRRLEMYCAPLKPAKSA
SEQ ID19 NGF-C fusion
PITINNFNYSDPVDNKNILYLDTHLNTLANEPEKAFRITGNIWVIPDRFSRNSNPNLNKPPRVTSPK
SGYYDPNYLSTDSDKDTFLKEIIKLFKRINSREIGEELIYRLSTDIPFPGNNNTPINTFDFDVDFNSV
DVKTRQGNNWVKTGSINPSVIITGPRENIIDPETSTFKLTNNTFAAQEGFGALSIISISPRFMLTYSN
ATNDVGEGRFSKSEFCMDPILILMHELNHAMHNLYGIAIPNDQTISSVTSNIFYSQYNVKLEYAEIY
AFGGPTIDLIPKSARKYFEEKALDYYRSIAKRLNSITTANPSSFNKYIGEYKQKLIRKYRFVVESSG
EVTVNRNKFVELYNELTQIFTEFNYAKIYNVQNRKIYLSNVYTPVTANILDDNVYDIQNGFNIPKSN
LNVLFMGQNLSRNPALRKVNPENMLYLFTKFCVDAIDGRSLYNKTLQCRELLVKNTDLPFIGDISD
VKTDIFLRKDINEETEVIYYPDNVSVDQVILSKNTSEHGQLDLLYPSIDSESEILPGENQVFYDNRT
QNVDYLNSYYYLESQKLSDNVEDFTFTRSIEEALDNSAKVYTYFPTLANKVNAGVQGGLFLMWA
NDVVEDFTTNILRKDTLDKISDVSAIIPYIGPALNISNSVRRGNFTEAFAVTGVTILLEAFPEFTIPAL
GAFVIYSKVQERNEIIKTIDNCLEQRIKRWKDSYEWMMGTWLSRIITQFNNISYQMYDSLNYQAG
AIKAKIDLEYKKYSGSDKENIKSQVENLKNSLDVKISEAMNNINKFIRECSVTYLFKNMLPKVIDELN
EFDRNTKAKLINLIDSHNIILVGEVDKLKAKVNNSFQNTIPFNIFSYTNNSLLKDIINEYFNLEGGGG
SGGGGSGGGGSALVEPHSESNVPAGHTIPQAHWTKLQHSLDTALRRARSAPAAAIAARVAGQT
RNITVDPRLFKKRRLRSPRVLFSTQPPREAADTQDLDFEVGGAAPFNRTHRSKRSSSHPIFHRG
EFSVCDSVSVWVGDKTTATDIKGKEVMVLGEVNINNSVFKQYFFETKCRDPNPVDSGCRGIDSK
HWNSYCTTTHTFVKALTMDGKQAAWRFIRIDTACVCVLSRKAVRRA
SEQ ID20 SST14-D fusion
TWPVKDFNYSDPVNDNDILYLRIPQNKLITTPVKAFMITQNIWVIPERFSSDTNPSLSKPPRPTSKY
QSYYDPSYLSTDEQKDTFLKGIIKLFKRINERDIGKKLINYLVVGSPFMGDSSTPEDTFDFTRHTTN
IAVEKFENGSWKVTNIITPSVLIFGPLPNILDYTASLTLQGQQSNPSFEGFGTLSILKVAPEFLLTFS
DVTSNQSSAVLGKSIFCMDPVIALMHELTHSLHQLYGINIPSDKRIRPQVSEGFFSQDGPNVQFE
ELYTFGGLDVEIIPQIERSQLREKALGHYKDIAKRLNNINKTIPSSWISNIDKYKKIFSEKYNFDKDN
TGNFVVNIDKFNSLYSDLTNVMSEVVYSSQYNVKNRTHYFSRHYLPVFANILDDNIYTIRDGFNLT
NKGFNIENSGQNIERNPALQKLSSESVVDLFTKVCVDKSEEKLYDDDDKDRWGSSLQCIKVKNN
RLPYVADKDSISQEIFENKIITDETNVQNYSDKFSLDESILDGQVPINPEIVDPLLPNVNMEPLNLPG
EEIVFYDDITKYVDYLNSYYYLESQKLSNNVENITLTTSVEEALGYSNKIYTFLPSLAEKVNKGVQA
GLFLNWANEVVEDFTTNIMKKDTLDKISDVSVIIPYIGPALNIGNSALRGNFNQAFATAGVAFLLEG
FPEFTIPALGVFTFYSSIQEREKIIKTIENCLEQRVKRWKDSYQWMVSNWLSRITTQFNHINYQMY
DSLSYQADAIKAKIDLEYKKYSGSDKENIKSQVENLKNSLDVKISEAMNNINKFIRECSVTYLFKNM
LPKVIDELNKFDLRTKTELINLIDSHNIILVGEVDRLKAKVNESFENTMPFNIFSYTNNSLLKDIINEY
FNLEGGGGSGGGGSGGGGSGGGGSALVAGCKNFFWKTFTSC
SEQ ID21 VIP-C fusion
PITINNFNYSDPVDNKNILYLDTHLNTLANEPEKAFRITGNIWVIPDRFSRNSNPNLNKPPRVTSPK
SGYYDPNYLSTDSDKDTFLKEIIKLFKRINSREIGEELIYRLSTDIPFPGNNNTPINTFDFDVDFNSV
DVKTRQGNNWVKTGSINPSVIITGPRENIIDPETSTFKLTNNTFAAQEGFGALSIISISPRFMLTYSN
ATNDVGEGRFSKSEFCMDPILILMHELNHAMHNLYGIAIPNDQTISSVTSNIFYSQYNVKLEYAEIY
AFGGPTIDLIPKSARKYFEEKALDYYRSIAKRLNSITTANPSSFNKYIGEYKQKLIRKYRFVVESSG
EVTVNRNKFVELYNELTQIFTEFNYAKIYNVQNRKIYLSNVYTPVTANILDDNVYDIQNGFNIPKSN
LNVLFMGQNLSRNPALRKVNPENMLYLFTKFCVDAIDGRSLYNKTLQCRELLVKNTDLPFIGDISD
VKTDIFLRKDINEETEVIYYPDNVSVDQVILSKNTSEHGQLDLLYPSIDSESEILPGENQVFYDNRT
QNVDYLNSYYYLESQKLSDNVEDFTFTRSIEEALDNSAKVYTYFPTLANKVNAGVQGGLFLMWA
NDVVEDFTTNILRKDTLDKISDVSAIIPYIGPALNISNSVRRGNFTEAFAVTGVTILLEAFPEFTIPAL
GAFVIYSKVQERNEIIKTIDNCLEQRIKRWKDSYEWMMGTWLSRIITQFNNISYQMYDSLNYQAG
AIKAKIDLEYKKYSGSDKENIKSQVENLKNSLDVKISEAMNNINKFIRECSVTYLFKNMLPKVIDELN
EFDRNTKAKLINLIDSHNIILVGEVDKLKAKVNNSFQNTIPFNIFSYTNNSLLKDIINEYFNLEGGGG
SGGGGSGGGGSALVHSDAVFTDNYTRLRKQMAVKKYLNSILN
SEQ ID22 ghrelin-A fusion
EFVNKQFNYKDPVNGVDIAYIKIPNAGQMQPVKAFKIHNKIWVIPERDTFTNPEEGDLNPPPEAKQ
VPVSYYDSTYLSTDNEKDNYLKGVTKLFERIYSTDLGRMLLTSIVRGIPFWGGSTIDTELKVIDTNC
INVIQPDGSYRSEELNLVIIGPSADIIQFECKSFGHEVLNLTRNGYGSTQYIRFSPDFTFGFEESLE
VDTNPLLGAGKFATDPAVTLAHELIHAGHRLYGIAINPNRVFKVNTNAYYEMSGLEVSFEELRTFG
GHDAKFIDSLQENEFRLYYYNKFKDIASTLNKAKSIVGTTASLQYMKNVFKEKYLLSEDTSGKFSV
DKLKFDKLYKMLTEIYTEDNFVKFFKVLNRKTYLNFDKAVFKINIVPKVNYTIYDGFNLRNTNLAAN
FNGQNTEINNMNFTKLKNFTGLFEFYKLLCVDGIITSKTKSDDDDKNKALNLQCIKVNNWDLFFSP
SEDNFTNDLNKGEEITSDTNIEAAEENISLDLIQQYYLTFNFDNEPENISIENLSSDIIGQLELMPNIE
RFPNGKKYELDKYTMFHYLRAQEFEHGKSRIALTNSVNEALLNPSRVYTFFSSDYVKKVNKATEA
AMFLGWVEQLVYDFTDETSEVSTTDKIADITIIIPYIGPALNIGNMLYKDDFVGALIFSGAVILLEFIPE
IAIPVLGTFALVSYIANKVLTVQTIDNALSKRNEKWDEVYKYIVTNWLAKVNTQIDLIRKKMKEALEN
QAEATKAIINYQYNQYTEEEKNNINFNIDDLSSKLNESINKAMININKFLNQCSVSYLMNSMIPYGV
KRLEDFDASLKDALLKYIYDNRGTLIGQVDRLKDKVNNTLSTDIPFQLSKYVDNQRLLSTLEGGGG
SGGGGSGGGGSALVGSSFLSPEHQRVQQRKESKKPPAKLQPR
SEQ ID23 Protein sequence of the CP-hGHRH29 N8A K12N M27L-LHD fusion
TWPVKDFNYSDPVNDNDILYLRIPQNKLITTPVKAFMITQNIWVIPERFSSDTNPSLSKPPRPTSKYQ
SYYDPSYLSTDEQKDTFLKGIIKLFKRINERDIGKKLINYLVVGSPFMGDSSTPEDTFDFTRHTTNIAV
EKFENGSWKVTNIITPSVLIFGPLPNILDYTASLTLQGQQSNPSFEGFGTLSILKVAPEFLLTFSDVTS
NQSSAVLGKSIFCMDPVIALMHELTHSLHQLYGINIPSDKRIRPQVSEGFFSQDGPNVQFEELYTFG
GLDVEIIPQIERSQLREKALGHYKDIAKRLNNINKTIPSSWISNIDKYKKIFSEKYNFDKDNTGNFVVNI
DKFNSLYSDLTNVMSEVVYSSQYNVKNRTHYFSRHYLPVFANILDDNIYTIRDGFNLTNKGFNIENS
GQNIERNPALQKLSSESVVDLFTKVCVDGIITSKTKSIEGRYADAIFTASYRNVLGQLSARKLLQDILS
RALAGGGGSGGGGSGGGGSALALQCIKVKNNRLPYVADKDSISQEIFENKIITDETNVQNYSDKFS
LDESILDGQVPINPEIVDPLLPNVNMEPLNLPGEEIVFYDDITKYVDYLNSYYYLESQKLSNNVENITL
TTSVEEALGYSNKIYTFLPSLAEKVNKGVQAGLFLNWANEVVEDFTTNIMKKDTLDKISDVSVIIPYIG
PALNIGNSALRGNFNQAFATAGVAFLLEGFPEFTIPALGVFTFYSSIQEREKIIKTIENCLEQRVKRWK
DSYQWMVSNWLSRITTQFNHINYQMYDSLSYQADAIKAKIDLEYKKYSGSDKENIKSQVENLKNSL
DVKISEAMNNINKFIRECSVTYLFKNMLPKVIDELNKFDLRTKTELINLIDSHNIILVGEVDRLKAKVNE
SFENTMPFNIFSYTNNSLLKDIINEYFN
SEQ ID24 Protein sequence N-termianal-hGHRH29 N8A M27L-LHD fusion
HVDAIFTQSYRKVLAQLSARKLLQDILNRNNNNNNNNNNTWPVKDFNYSDPVNDNDILYLRIPQNKL
ITTPVKAFMITQNIWVIPERFSSDTNPSLSKPPRPTSKYQSYYDPSYLSTDEQKDTFLKGIIKLFKRIN
ERDIGKKLINYLVVGSPFMGDSSTPEDTFDFTRHTTNIAVEKFENGSWKVTNIITPSVLIFGPLPNILD
YTASLTLQGQQSNPSFEGFGTLSILKVAPEFLLTFSDVTSNQSSAVLGKSIFCMDPVIALMHELTHSL
HQLYGINIPSDKRIRPQVSEGFFSQDGPNVQFEELYTFGGLDVEIIPQIERSQLREKALGHYKDIAKR
LNNINKTIPSSWISNIDKYKKIFSEKYNFDKDNTGNFVVNIDKFNSLYSDLTNVMSEVVYSSQYNVKN
RTHYFSRHYLPVFANILDDNIYTIRDGFNLTNKGFNIENSGQNIERNPALQKLSSESVVDLFTKVCVD
KSEEKLYDDDDKDRWGSSLQCIKVKNNRLPYVADKDSISQEIFENKIITDETNVQNYSDKFSLDESIL
DGQVPINPEIVDPLLPNVNMEPLNLPGEEIVFYDDITKYVDYLNSYYYLESQKLSNNVENITLTTSVE
EALGYSNKIYTFLPSLAEKVNKGVQAGLFLNWANEVVEDFTTNIMKKDTLDKISDVSVIIPYIGPALNI
GNSALRGNFNQAFATAGVAFLLEGFPEFTIPALGVFTFYSSIQEREKIIKTIENCLEQRVKRWKDSYQ
WMVSNWLSRITTQFNHINYQMYDSLSYQADAIKAKIDLEYKKYSGSDKENIKSQVENLKNSLDVKIS
EAMNNINKFIRECSVTYLFKNMLPKVIDELNKFDLRTKTELINLIDSHNIILVGEVDRLKAKVNESFENT
MPFNIFSYTNNSLLKDIINEYFN
SEQ ID25 IgA-H_{N}tet-SST14 fusion
ESNQPEKNGTATKPENSGNTTSENGQTEPEKKLELRNVSDIELYSQTNGTYRQHVSLDGIPENTDT
YFVKVKSSAFKDVYIPVASITEEKRNGQSVYKITAKAEKLQQELENKYVDNFTFYLDKKAKEENTNF
TSFSNLVKAINQNPSGTYHLAASLNANEVELGPDERSYIKDTFTGRLIGEKDGKNYAIYNLKKPLFEN
LSGATVEKLSLKNVAISGKNDIGSLANEATNGTKIKQVHVDGCVDGIITSKTKSDDDDKNKALNLQCI
KIKNEDLTFIAEKNSFSEEPFQDEIVSYNTKNKPLNFNYSLDKIIVDYNLQSKITLPNDRTTPVTKGIPY
APEYKSNAASTIEIHNIDDNTIYQYLYAQKSPTTLQRITMTNSVDDALINSTKIYSYFPSVISKVNQGA
QGILFLQWVRDIIDDFTNESSQKTTIDKISDVSTIVPYIGPALNIVKQGYEGNFIGALETTGVVLLLEYIP
EITLPVIAALSIAESSTQKEKIIKTIDNFLEKRYEKWIEVYKLVKAKWLGTVNTQFQKRSYQMYRSLEY
QVDAIKKIIDYEYKIYSGPDKEQIADEINNLKNKLEEKANKAMININIFMRESSRSFLVNQMINEAKKQL
LEFDTQSKNILMQYIKANSKFIGITELKKLESKINKVFSTPIPFSYSKNLDCWVDNEEDIDVLEGGGGS
GGGGSGGGGSALVAGCKNFFWKTFTSC
SEQ ID26 IgA-H_{N}tet-GHRP fusion
ESNQPEKNGTATKPENSGNTTSENGQTEPEKKLELRNVSDIELYSQTNGTYRQHVSLDGIPENTDT
YFVKVKSSAFKDVYIPVASITEEKRNGQSVYKITAKAEKLQQELENKYVDNFTFYLDKKAKEENTNF
TSFSNLVKAINQNPSGTYHLAASLNANEVELGPDERSYIKDTFTGRLIGEKDGKNYAIYNLKKPLFEN
LSGATVEKLSLKNVAISGKNDIGSLANEATNGTKIKQVHVDGCVDGIITSKTKSDDDDKNKALNLQCI
KIKNEDLTFIAEKNSFSEEPFQDEIVSYNTKNKPLNFNYSLDKIIVDYNLQSKITLPNDRTTPVTKGIPY
APEYKSNAASTIEIHNIDDNTIYQYLYAQKSPTTLQRITMTNSVDDALINSTKIYSYFPSVISKVNQGA
QGILFLQWVRDIIDDFTNESSQKTTIDKISDVSTIVPYIGPALNIVKQGYEGNFIGALETTGVVLLLEYIP
EITLPVIAALSIAESSTQKEKIIKTIDNFLEKRYEKWIEVYKLVKAKWLGTVNTQFQKRSYQMYRSLEY
QVDAIKKIIDYEYKIYSGPDKEQIADEINNLKNKLEEKANKAMININIFMRESSRSFLVNQMINEAKKQL
LEFDTQSKNILMQYIKANSKFIGITELKKLESKINKVFSTPIPFSYSKNLDCWVDNEEDIDVLEGGGGS
GGGGSGGGGSALVGSSFLSPEHQRVQQRKESKKPPAKLQPR
SEQ ID27 ghrelin S3W-A fusion
EFVNKQFNYKDPVNGVDIAYIKIPNAGQMQPVKAFKIHNKIWVIPERDTFTNPEEGDLNPPPEAKQV
PVSYYDSTYLSTDNEKDNYLKGVTKLFERIYSTDLGRMLLTSIVRGIPFWGGSTIDTELKVIDTNCINV
IQPDGSYRSEELNLVIIGPSADIIQFECKSFGHEVLNLTRNGYGSTQYIRFSPDFTFGFEESLEVDTN
PLLGAGKFATDPAVTLAHELIHAGHRLYGIAINPNRVFKVNTNAYYEMSGLEVSFEELRTFGGHDAK
FIDSLQENEFRLYYYNKFKDIASTLNKAKSIVGTTASLQYMKNVFKEKYLLSEDTSGKFSVDKLKFDK
LYKMLTEIYTEDNFVKFFKVLNRKTYLNFDKAVFKINIVPKVNYTIYDGFNLRNTNLAANFNGQNTEIN
NMNFTKLKNFTGLFEFYKLLCVDGIITSKTKSDDDDKNKALNLQCIKVNNWDLFFSPSEDNFTNDLN
KGEEITSDTNIEAAEENISLDLIQQYYLTFNFDNEPENISIENLSSDIIGQLELMPNIERFPNGKKYELD
KYTMFHYLRAQEFEHGKSRIALTNSVNEALLNPSRVYTFFSSDYVKKVNKATEAAMFLGWVEQLVY
DFTDETSEVSTTDKIADITIIIPYIGPALNIGNMLYKDDFVGALIFSGAVILLEFIPEIAIPVLGTFALVSYIA
NKVLTVQTIDNALSKRNEKWDEVYKYIVTNWLAKVNTQIDLIRKKMKEALENQAEATKAIINYQYNQY
TEEEKNNINFNIDDLSSKLNESINKAMININKFLNQCSVSYLMNSMIPYGVKRLEDFDASLKDALLKYI
YDNRGTLIGQVDRLKDKVNNTLSTDIPFQLSKYVDNQRLLSTLEIYALVGSWFLSPEHQRVQQRKE
SKKPPAKLQPR
SEQ ID28 SST28-D fusion
TWPVKDFNYSDPVNDNDILYLRIPQNKLITTPVKAFMITQNIWVIPERFSSDTNPSLSKPPRPTSKY
QSYYDPSYLSTDEQKDTFLKGIIKLFKRINERDIGKKLINYLVVGSPFMGDSSTPEDTFDFTRHTTN
IAVEKFENGSWKVTNIITPSVLIFGPLPNILDYTASLTLQGQQSNPSFEGFGTLSILKVAPEFLLTFS
DVTSNQSSAVLGKSIFCMDPVIALMHELTHSLHQLYGINIPSDKRIRPQVSEGFFSQDGPNVQFE
ELYTFGGLDVEIIPQIERSQLREKALGHYKDIAKRLNNINKTIPSSWISNIDKYKKIFSEKYNFDKDN
TGNFVVNIDKFNSLYSDLTNVMSEVVYSSQYNVKNRTHYFSRHYLPVFANILDDNIYTIRDGFNLT
NKGFNIENSGQNIERNPALQKLSSESVVDLFTKVCVDKSEEKLYDDDDKDRWGSSLQCIKVKNN
RLPYVADKDSISQEIFENKIITDETNVQNYSDKFSLDESILDGQVPINPEIVDPLLPNVNMEPLNLPG
EEIVFYDDITKYVDYLNSYYYLESQKLSNNVENITLTTSVEEALGYSNKIYTFLPSLAEKVNKGVQA
GLFLNWANEVVEDFTTNIMKKDTLDKISDVSVIIPYIGPALNIGNSALRGNFNQAFATAGVAFLLEG
FPEFTIPALGVFTFYSSIQEREKIIKTIENCLEQRVKRWKDSYQWMVSNWLSRITTQFNHINYQMY
DSLSYQADAIKAKIDLEYKKYSGSDKENIKSQVENLKNSLDVKISEAMNNINKFIRECSVTYLFKNM
LPKVIDELNKFDLRTKTELINLIDSHNIILVGEVDRLKAKVNESFENTMPFNIFSYTNNSLLKDIINEY
FNLEGGGGSGGGGSGGGGSGGGGSGGGGSALVSANSNPAMAPRERKAGCKNFFWKTFTSC
SEQ ID29 GRP-D fusion
TWPVKDFNYSDPVNDNDILYLRIPQNKLITTPVKAFMITQNIWVIPERFSSDTNPSLSKPPRPTSKY
QSYYDPSYLSTDEQKDTFLKGIIKLFKRINERDIGKKLINYLVVGSPFMGDSSTPEDTFDFTRHTTN
IAVEKFENGSWKVTNIITPSVLIFGPLPNILDYTASLTLQGQQSNPSFEGFGTLSILKVAPEFLLTFS
DVTSNQSSAVLGKSIFCMDPVIALMHELTHSLHQLYGINIPSDKRIRPQVSEGFFSQDGPNVQFE
ELYTFGGLDVEIIPQIERSQLREKALGHYKDIAKRLNNINKTIPSSWISNIDKYKKIFSEKYNFDKDN
TGNFVVNIDKFNSLYSDLTNVMSEVVYSSQYNVKNRTHYFSRHYLPVFANILDDNIYTIRDGFNLT
NKGFNIENSGQNIERNPALQKLSSESVVDLFTKVCVDKSEEKLYDDDDKDRWGSSLQCIKVKNN
RLPYVADKDSISQEIFENKIITDETNVQNYSDKFSLDESILDGQVPINPEIVDPLLPNVNMEPLNLPG
EEIVFYDDITKYVDYLNSYYYLESQKLSNNVENITLTTSVEEALGYSNKIYTFLPSLAEKVNKGVQA
GLFLNWANEVVEDFTTNIMKKDTLDKISDVSVIIPYIGPALNIGNSALRGNFNQAFATAGVAFLLEG
FPEFTIPALGVFTFYSSIQEREKIIKTIENCLEQRVKRWKDSYQWMVSNWLSRITTQFNHINYQMY
DSLSYQADAIKAKIDLEYKKYSGSDKENIKSQVENLKNSLDVKISEAMNNINKFIRECSVTYLFKNM
LPKVIDELNKFDLRTKTELINLIDSHNIILVGEVDRLKAKVNESFENTMPFNIFSYTNNSLLKDIINEY
FNLEGGGGSGGGGSGGGGSALVGNHWAVGHLM
SEQ ID30 GRP-B fusion
PVTINNFNYNDPIDNNNIIMMEPPFARGTGRYYKAFKITDRIWIIPERYTFGYKPEDFNKSSGIFNR
DVCEYYDPDYLNTNDKKNIFLQTMIKLFNRIKSKPLGEKLLEMIINGIPYLGDRRVPLEEFNTNIASV
TVNKLISNPGEVERKKGIFANLIIFGPGPVLNENETIDIGIQNHFASREGFGGIMQMKFCPEYVSVF
NNVQENKGASIFNRRGYFSDPALILMHELIHVLHGLYGIKVDDLPIVPNEKKFFMQSTDAIQAEELY
TFGGQDPSIITPSTDKSIYDKVLQNFRGIVDRLNKVLVCISDPNININIYKNKFKDKYKFVEDSEGKY
SIDVESFDKLYKSLMFGFTETNIAENYKIKTRASYFSDSLPPVKIKNLLDNEIYTIEEGFNISDKDME
KEYRGQNKAINKQAYEEISKEHLAVYKIQMCVDEEKLYDDDDKDRWGSSLQCIDVDNEDLFFIAD
KNSFSDDLSKNERIEYNTQSNYIENDFPINELILDTDLISKIELPSENTESLTDFNVDVPVYEKQPAI
KKIFTDENTIFQYLYSQTFPLDIRDISLTSSFDDALLFSNKVYSFFSMDYIKTANKVVEAGLFAGWV
KQIVNDFVIEANKSNTMDAIADISLIVPYIGLALNVGNETAKGNFENAFEIAGASILLEFIPELLIPVVG
AFLLESYIDNKNKIIKTIDNALTKRNEKWSDMYGLIVAQWLSTVNTQFYTIKEGMYKALNYQAQAL
EEIIKYRYNIYSEKEKSNINIDFNDINSKLNEGINQAIDNINNFINGCSVSYLMKKMIPLAVEKLLDFD
NTLKKNLLNYIDENKLYLIGSAEYEKSKVNKYLKTIMPFDLSIYTNDTILIEMFNKYNSLEGGGGSG
GGGSGGGGSALVGNHWAVGHLM
SEQ ID31 CP-qGHRH29 linker
ggatccGTCGACaacaacaataacaacaacaataacaacaacgacgatgacgataaaCATGTGGATGCGATCTTT
ACCCAGAGCTATCGGAAGGTTTTGGCCCAACTGTCTGCTCGTAAACTTTTACAGGACATTCT
GAACAGAGCAgaagcggcagccaaagaagcagccgctaaggcgctgcagagtctagaataataagctt
SEQ ID32 CP-qGHRH29-D fusion
ggatccatgacgtggccagttaaggatttcaactactcagatcctgtaaatgacaacgatattctgtaccttcgcattccacaaaataaact
gatcaccacaccagtcaaagcattcatgattactcaaaacatttgggtcattccagaacgcttttctagtgacacaaatccgagtttatctaa
acctccgcgtccgacgtccaaatatcagagctattacgatccctcatatctcagtacggacgaacaaaaagatactttccttaaaggtatc
attaaactgtttaagcgtattaatgagcgcgatatcgggaaaaagttgattaattatcttgttgtgggttccccgttcatgggcgatagctctac
ccccgaagacacttttgattttacccgtcatacgacaaacatcgcggtagagaagtttgagaacggatcgtggaaagtcacaaacatca
ttacacctagcgtcttaatttttggtccgctgccaaacatcttagattatacagccagcctgactttgcaggggcaacagtcgaatccgagttt
cgaaggttttggtaccctgagcattctgaaagttgccccggaatttctgctcactttttcagatgtcaccagcaaccagagctcagcagtatt
aggaaagtcaattttttgcatggacccggttattgcactgatgcacgaactgacgcactctctgcatcaactgtatgggatcaacatcccca
gtgacaaacgtattcgtccccaggtgtctgaaggatttttctcacaggatgggccgaacgtccagttcgaagagttgtatactttcggaggc
ctggacgtagagatcattccccagattgagcgcagtcagctgcgtgagaaggcattgggccattataaggatattgcaaaacgcctgaa
taacattaacaaaacgattccatcttcgtggatctcgaatattgataaatataagaaaatttttagcgagaaatataattttgataaagataat
acaggtaactttgtggttaacattgacaaattcaactccctttacagtgatttgacgaatgtaatgagcgaagttgtgtatagttcccaataca
acgttaagaatcgtacccattacttctctcgtcactacctgccggttttcgcgaacatccttgacgataatatttacactattcgtgacggctt
taacttgaccaacaagggcttcaatattgaaaattcaggccagaacattgaacgcaacccggccttgcagaaactgtcgagtgaatccgt
ggttgacctgtttaccaaagtctgcGTCGACaacaacaataacaacaacaataacaacaacgacgatgacgataaaCATGTG
GATGCGATCTTTACCCAGAGCTATCGGAAGGTTTTGGCCCAACTGTCTGCTCGTAAACTTTT
ACAGGACATTCTGAACAGAGCAgaagcggcagccaaagaagcagccgctaaggcgctgcagtgtattaaagtgaaa
aacaatcggctgccttatgtagcagataaagatagcattagtcaggagattttcgaaaataaaattatcactgacgaaaccaatgttcag
aattattcagataaattttcactggacgaaagcatcttagatggccaagttccgattaacccggaaattgttgatccgttactgccgaacgtg
aatatggaaccgttaaacctccctggcgaagagatcgtattttatgatgacattacgaaatatgtggactaccttaattcttattactatttgga
aagccagaaactgtccaataacgtggaaaacattactctgaccacaagcgtggaagaggctttaggctactcaaataagatttatacctt
cctcccgtcgctggcggaaaaagtaaataaaggtgtgcaggctggtctgttcctcaactgggcgaatgaagttgtcgaagactttaccac
gaatattatgaaaaaggataccctggataaaatctccgacgtctcggttattatcccatatattggccctgcgttaaatatcggtaatagtgc
gctgcgggggaattttaaccaggcctttgctaccgcgggcgtcgcgttcctcctggagggctttcctgaatttactatcccggcgctcggtgt
ttttacattttactcttccatccaggagcgtgagaaaattatcaaaaccatcgaaaactgcctggagcagcgggtgaaacgctggaaaga
ttcttatcaatggatggtgtcaaactggttatctcgcatcacgacccaattcaaccatattaattaccagatgtatgatagtctgtcgtaccaa
gctgacgccattaaagccaaaattgatctggaatataaaaagtactctggtagcgataaggagaacatcaaaagccaggtggagaac
cttaagaatagtctggatgtgaaaatctctgaagctatgaataacattaacaaattcattcgtgaatgttcggtgacgtacctgttcaagaat
atgctgccaaaagttattgatgaactgaataaatttgatctgcgtaccaaaaccgaacttatcaacctcatcgactcccacaacattatcctt
gtgggcgaagtggatcgtctgaaggccaaagtaaacgagagctttgaaaatacgatgccgtttaatattttttcatataccaataactcctt
gctgaaagatatcatcaatgaatatttcaatctagaataatgaaagctt
SEQ ID33 CP-qGHRH29-D fusion
TWPVKDFNYSDPVNDNDILYLRIPQNKLITTPVKAFMITQNIWVIPERFSSDTNPSLSKPPRPTSKY
QSYYDPSYLSTDEQKDTFLKGIIKLFKRINERDIGKKLINYLVVGSPFMGDSSTPEDTFDFTRHTTN
IAVEKFENGSWKVTNIITPSVLIFGPLPNILDYTASLTLQGQQSNPSFEGFGTLSILKVAPEFLLTFS
DVTSNQSSAVLGKSIFCMDPVIALMHELTHSLHQLYGINIPSDKRIRPQVSEGFFSQDGPNVQFE
ELYTFGGLDVEIIPQIERSQLREKALGHYKDIAKRLNNINKTIPSSWISNIDKYKKIFSEKYNFDKDN
TGNFVVNIDKFNSLYSDLTNVMSEVVYSSQYNVKNRTHYFSRHYLPVFANILDDNIYTIRDGFNLT
NKGFNIENSGQNIERNPALQKLSSESVVDLFTKVCVDNNNNNNNNNNDDDDKHVDAIFTQSYRK
VLAQLSARKLLQDILNRAEAAAKEAAAKALQCIKVKNNRLPYVADKDSISQEIFENKIITDETNVQN
YSDKFSLDESILDGQVPINPEIVDPLLPNVNMEPLNLPGEEIVFYDDITKYVDYLNSYYYLESQKLS
NNVENITLTTSVEEALGYSNKIYTFLPSLAEKVNKGVQAGLFLNWANEVVEDFTTNIMKKDTLDKI
SDVSVIIPYIGPALNIGNSALRGNFNQAFATAGVAFLLEGFPEFTIPALGVFTFYSSIQEREKIIKTIE
NCLEQRVKRWKDSYQWMVSNWLSRITTQFNHINYQMYDSLSYQADAIKAKIDLEYKKYSGSDKE
NIKSQVENLKNSLDVKISEAMNNINKFIRECSVTYLFKNMLPKVIDELNKFDLRTKTELINLIDSHNII
LVGEVDRLKAKVNESFENTMPFNIFSYTNNSLLKDIINEYFN
SEQ ID34 CP-qGHRH-A fusion
EFVNKQFNYKDPVNGVDIAYIKIPNAGQMQPVKAFKIHNKIWVIPERDTFTNPEEGDLNPPPEAKQ
VPVSYYDSTYLSTDNEKDNYLKGVTKLFERIYSTDLGRMLLTSIVRGIPFWGGSTIDTELKVIDTNC
INVIQPDGSYRSEELNLVIIGPSADIIQFECKSFGHEVLNLTRNGYGSTQYIRFSPDFTFGFEESLE
VDTNPLLGAGKFATDPAVTLAHELIHAGHRLYGIAINPNRVFKVNTNAYYEMSGLEVSFEELRTFG
GHDAKFIDSLQENEFRLYYYNKFKDIASTLNKAKSIVGTTASLQYMKNVFKEKYLLSEDTSGKFSV
DKLKFDKLYKMLTEIYTEDNFVKFFKVLNRKTYLNFDKAVFKINIVPKVNYTIYDGFNLRNTNLAAN
FNGQNTEINNMNFTKLKNFTGLFEFYKLLCVDGIITSKTKSLIEGRHVDAIFTQSYRKVLAQLSARK
LLQDILNRQQGERNQEQGALAGGGGSGGGGSGGGGSALVLQCIKVNNWDLFFSPSEDNFTND
LNKGEEITSDTNIEAAEENISLDLIQQYYLTFNFDNEPENISIENLSSDIIGQLELMPNIERFPNGKKY
ELDKYTMFHYLRAQEFEHGKSRIALTNSVNEALLNPSRVYTFFSSDYVKKVNKATEAAMFLGWV
EQLVYDFTDETSEVSTTDKIADITIIIPYIGPALNIGNMLYKDDFVGALIFSGAVILLEFIPEIAIPVLGT
FALVSYIANKVLTVQTIDNALSKRNEKWDEVYKYIVTNWLAKVNTQIDLIRKKMKEALENQAEATK
AIINYQYNQYTEEEKNNINFNIDDLSSKLNESINKAMININKFLNQCSVSYLMNSMIPYGVKRLEDF
DASLKDALLKYIYDNRGTLIGQVDRLKDKVNNTLSTDIPFQLSKYVDNQRLLST
SEQ ID35 CP-qGHRH-C fusion
PITINNFNYSDPVDNKNILYLDTHLNTLANEPEKAFRITGNIWVIPDRFSRNSNPNLNKPPRVTSPK
SGYYDPNYLSTDSDKDTFLKEIIKLFKRINSREIGEELIYRLSTDIPFPGNNNTPINTFDFDVDFNSV
DVKTRQGNNWVKTGSINPSVIITGPRENIIDPETSTFKLTNNTFAAQEGFGALSIISISPRFMLTYSN
ATNDVGEGRFSKSEFCMDPILILMHELNHAMHNLYGIAIPNDQTISSVTSNIFYSQYNVKLEYAEIY
AFGGPTIDLIPKSARKYFEEKALDYYRSIAKRLNSITTANPSSFNKYIGEYKQKLIRKYRFVVESSG
EVTVNRNKFVELYNELTQIFTEFNYAKIYNVQNRKIYLSNVYTPVTANILDDNVYDIQNGFNIPKSN
LNVLFMGQNLSRNPALRKVNPENMLYLFTKFCVDAIDGRHVDAIFTQSYRKVLAQLSARKLLQDIL
NRQQGERNQEQGALAGGGGSGGGGSGGGGSALVLQCRELLVKNTDLPFIGDISDVKTDIFLRK
DINEETEVIYYPDNVSVDQVILSKNTSEHGQLDLLYPSIDSESEILPGENQVFYDNRTQNVDYLNS
YYYLESQKLSDNVEDFTFTRSIEEALDNSAKVYTYFPTLANKVNAGVQGGLFLMWANDVVEDFT
TNILRKDTLDKISDVSAIIPYIGPALNISNSVRRGNFTEAFAVTGVTILLEAFPEFTIPALGAFVIYSKV
QERNEIIKTIDNCLEQRIKRWKDSYEWMMGTWLSRIITQFNNISYQMYDSLNYQAGAIKAKIDLEY
KKYSGSDKENIKSQVENLKNSLDVKISEAMNNINKFIRECSVTYLFKNMLPKVIDELNEFDRNTKA
KLINLIDSHNIILVGEVDKLKAKVNNSFQNTIPFNIFSYTNNSLLKDIINEYFN
SEQ ID36 CP-qGHRH-D fusion
TWPVKDFNYSDPVNDNDILYLRIPQNKLITTPVKAFMITQNIWVIPERFSSDTNPSLSKPPRPTSKY
QSYYDPSYLSTDEQKDTFLKGIIKLFKRINERDIGKKLINYLVVGSPFMGDSSTPEDTFDFTRHTTN
IAVEKFENGSWKVTNIITPSVLIFGPLPNILDYTASLTLQGQQSNPSFEGFGTLSILKVAPEFLLTFS
DVTSNQSSAVLGKSIFCMDPVIALMHELTHSLHQLYGINIPSDKRIRPQVSEGFFSQDGPNVQFE
ELYTFGGLDVEIIPQIERSQLREKALGHYKDIAKRLNNINKTIPSSWISNIDKYKKIFSEKYNFDKDN
TGNFVVNIDKFNSLYSDLTNVMSEVVYSSQYNVKNRTHYFSRHYLPVFANILDDNIYTIRDGFNLT
NKGFNIENSGQNIERNPALQKLSSESVVDLFTKVCVDGIITSKTKSDDDDKHVDAIFTQSYRKVLA
QLSARKLLQDILNRQQGERNQEQGAALAGGGGSGGGGSGGGGSALALQCIKVKNNRLPYVAD
KDSISQEIFENKIITDETNVQNYSDKFSLDESILDGQVPINPEIVDPLLPNVNMEPLNLPGEEIVFYD
DITKYVDYLNSYYYLESQKLSNNVENITLTTSVEEALGYSNKIYTFLPSLAEKVNKGVQAGLFLNW
ANEVVEDFTTNIMKKDTLDKISDVSVIIPYIGPALNIGNSALRGNFNQAFATAGVAFLLEGFPEFTIP
ALGVFTFYSSIQEREKIIKTIENCLEQRVKRWKDSYQWMVSNWLSRITTQFNHINYQMYDSLSYQ
ADAIKAKIDLEYKKYSGSDKENIKSQVENLKNSLDVKISEAMNNINKFIRECSVTYLFKNMLPKVID
ELNKFDLRTKTELINLIDSHNIILVGEVDRLKAKVNESFENTMPFNIFSYTNNSLLKDIINEYFN
SEQ ID37 CP-qGHRH-D N10-PL5 fusion
TWPVKDFNYSDPVNDNDILYLRIPQNKLITTPVKAFMITQNIWVIPERFSSDTNPSLSKPPRPTSKY
QSYYDPSYLSTDEQKDTFLKGIIKLFKRINERDIGKKLINYLVVGSPFMGDSSTPEDTFDFTRHTTN
IAVEKFENGSWKVTNIITPSVLIFGPLPNILDYTASLTLQGQQSNPSFEGFGTLSILKVAPEFLLTFS
DVTSNQSSAVLGKSIFCMDPVIALMHELTHSLHQLYGINIPSDKRIRPQVSEGFFSQDGPNVQFE
ELYTFGGLDVEIIPQIERSQLREKALGHYKDIAKRLNNINKTIPSSWISNIDKYKKIFSEKYNFDKDN
TGNFVVNIDKFNSLYSDLTNVMSEVVYSSQYNVKNRTHYFSRHYLPVFANILDDNIYTIRDGFNLT
NKGFNIENSGQNIERNPALQKLSSESVVDLFTKVCVDNNNNNNNNNNDDDDKHVDAIFTQSYRK
VLAQLSARKLLQDILNRQQGERNQEQGAPAPAPLQCIKVKNNRLPYVADKDSISQEIFENKIITDE
TNVQNYSDKFSLDESILDGQVPINPEIVDPLLPNVNMEPLNLPGEEIVFYDDITKYVDYLNSYYYLE
SQKLSNNVENITLTTSVEEALGYSNKIYTFLPSLAEKVNKGVQAGLFLNWANEVVEDFTTNIMKKD
TLDKISDVSVIIPYIGPALNIGNSALRGNFNQAFATAGVAFLLEGFPEFTIPALGVFTFYSSIQEREKI
IKTIENCLEQRVKRWKDSYQWMVSNWLSRITTQFNHINYQMYDSLSYQADAIKAKIDLEYKKYSG
SDKENIKSQVENLKNSLDVKISEAMNNINKFIRECSVTYLFKNMLPKVIDELNKFDLRTKTELINLID
SHNIILVGEVDRLKAKVNESFENTMPFNIFSYTNNSLLKDIINEYFN
SEQ ID38 CP-qGHRH-D N10-HX12 fusion
TWPVKDFNYSDPVNDNDILYLRIPQNKLITTPVKAFMITQNIWVIPERFSSDTNPSLSKPPRPTSKYQ
SYYDPSYLSTDEQKDTFLKGIIKLFKRINERDIGKKLINYLVVGSPFMGDSSTPEDTFDFTRHTTNIAV
EKFENGSWKVTNIITPSVLIFGPLPNILDYTASLTLQGQQSNPSFEGFGTLSILKVAPEFLLTFSDVTS
NQSSAVLGKSIFCMDPVIALMHELTHSLHQLYGINIPSDKRIRPQVSEGFFSQDGPNVQFEELYTFG
GLDVEIIPQIERSQLREKALGHYKDIAKRLNNINKTIPSSWISNIDKYKKIFSEKYNFDKDNTGNFVVNI
DKFNSLYSDLTNVMSEVVYSSQYNVKNRTHYFSRHYLPVFANILDDNIYTIRDGFNLTNKGFNIENS
GQNIERNPALQKLSSESVVDLFTKVCVDNNNNNNNNNNDDDDKHVDAIFTQSYRKVLAQLSARKLL
QDILNRQQGERNQEQGAEAAAKEAAAKALQCIKVKNNRLPYVADKDSISQEIFENKIITDETNVQNY
SDKFSLDESILDGQVPINPEIVDPLLPNVNMEPLNLPGEEIVFYDDITKYVDYLNSYYYLESQKLSNN
VENITLTTSVEEALGYSNKIYTFLPSLAEKVNKGVQAGLFLNWANEVVEDFTTNIMKKDTLDKISDVS
VIIPYIGPALNIGNSALRGNFNQAFATAGVAFLLEGFPEFTIPALGVFTFYSSIQEREKIIKTIENCLEQR
VKRWKDSYQWMVSNWLSRITTQFNHINYQMYDSLSYQADAIKAKIDLEYKKYSGSDKENIKSQVEN
LKNSLDVKISEAMNNINKFIRECSVTYLFKNMLPKVIDELNKFDLRTKTELINLIDSHNIILVGEVDRLKA
KVNESFENTMPFNIFSYTNNSLLKDIINEYFN
SEQ ID39 CP-SST28-D fusion
TWPVKDFNYSDPVNDNDILYLRIPQNKLITTPVKAFMITQNIWVIPERFSSDTNPSLSKPPRPTSKY
QSYYDPSYLSTDEQKDTFLKGIIKLFKRINERDIGKKLINYLVVGSPFMGDSSTPEDTFDFTRHTTN
IAVEKFENGSWKVTNIITPSVLIFGPLPNILDYTASLTLQGQQSNPSFEGFGTLSILKVAPEFLLTFS
DVTSNQSSAVLGKSIFCMDPVIALMHELTHSLHQLYGINIPSDKRIRPQVSEGFFSQDGPNVQFE
ELYTFGGLDVEIIPQIERSQLREKALGHYKDIAKRLNNINKTIPSSWISNIDKYKKIFSEKYNFDKDN
TGNFVVNIDKFNSLYSDLTNVMSEVVYSSQYNVKNRTHYFSRHYLPVFANILDDNIYTIRDGFNLT
NKGFNIENSGQNIERNPALQKLSSESVVDLFTKVCVDGIITSKTKSDDDDKSANSNPAMAPRERK
AGCKNFFWKTFTSCALAGGGGSGGGGSGGGGSALALQCIKVKNNRLPYVADKDSISQEIFENKII
TDETNVQNYSDKFSLDESILDGQVPINPEIVDPLLPNVNMEPLNLPGEEIVFYDDITKYVDYLNSYY
YLESQKLSNNVENITLTTSVEEALGYSNKIYTFLPSLAEKVNKGVQAGLFLNWANEWEDFTTNIM
KKDTLDKISDVSVIIPYIGPALNIGNSALRGNFNQAFATAGVAFLLEGFPEFTIPALGVFTFYSSIQE
REKIIKTIENCLEQRVKRWKDSYQWMVSNWLSRITTQFNHINYQMYDSLSYQADAIKAKIDLEYKK
YSGSDKENIKSQVENLKNSLDVKISEAMNNINKFIRECSVTYLFKNMLPKVIDELNKFDLRTKTELI
NLIDSHNIILVGEVDRLKAKVNESFENTMPFNIFSYTNNSLLKDIINEYFN
SEQ ID40 CP-SST14-D fusion
TWPVKDFNYSDPVNDNDILYLRIPQNKLITTPVKAFMITQNIWVIPERFSSDTNPSLSKPPRPTSKY
QSYYDPSYLSTDEQKDTFLKGIIKLFKRINERDIGKKLINYLVVGSPFMGDSSTPEDTFDFTRHTTN
IAVEKFENGSWKVTNIITPSVLIFGPLPNILDYTASLTLQGQQSNPSFEGFGTLSILKVAPEFLLTFS
DVTSNQSSAVLGKSIFCMDPVIALMHELTHSLHQLYGINIPSDKRIRPQVSEGFFSQDGPNVQFE
ELYTFGGLDVEIIPQIERSQLREKALGHYKDIAKRLNNINKTIPSSWISNIDKYKKIFSEKYNFDKDN
TGNFVVNIDKFNSLYSDLTNVMSEVVYSSQYNVKNRTHYFSRHYLPVFANILDDNIYTIRDGFNLT
NKGFNIENSGQNIERNPALQKLSSESVVDLFTKVCVDGIITSKTKSDDDDKAGCKNFFWKTFTSC
ALAGGGGSGGGGSGGGGSALALQCIKVKNNRLPYVADKDSISQEIFENKIITDETNVQNYSDKFS
LDESILDGQVPINPEIVDPLLPNVNMEPLNLPGEEIVFYDDITKYVDYLNSYYYLESQKLSNNVENI
TLTTSVEEALGYSNKIYTFLPSLAEKVNKGVQAGLFLNWANEVVEDFTTNIMKKDTLDKISDVSVII
PYIGPALNIGNSALRGNFNQAFATAGVAFLLEGFPEFTIPALGVFTFYSSIQEREKIIKTIENCLEQR
VKRWKDSYQWMVSNWLSRITTQFNHINYQMYDSLSYQADAIKAKIDLEYKKYSGSDKENIKSQV
ENLKNSLDVKISEAMNNINKFIRECSVTYLFKNMLPKVIDELNKFDLRTKTELINLIDSHNIILVGEVD
RLKAKVNESFENTMPFNIFSYTNNSLLKDIINEYFN
SEQ ID41 IgA-CP-SST14-H_{N}tet fusion
ESNQPEKNGTATKPENSGNTTSENGQTEPEKKLELRNVSDIELYSQTNGTYRQHVSLDGIPENT
DTYFVKVKSSAFKDVYIPVASITEEKRNGQSVYKITAKAEKLQQELENKYVDNFTFYLDKKAKEEN
TNFTSFSNLVKAINQNPSGTYHLAASLNANEVELGPDERSYIKDTFTGRLIGEKDGKNYAIYNLKK
PLFENLSGATVEKLSLKNVAISGKNDIGSLANEATNGTKIKQVHVDGCVDGIITSKTKSDDDDKAG
CKNFFWKTFTSCALAGGGGSGGGGSGGGGSALALQCIKIKNEDLTFIAEKNSFSEEPFQDEIVSY
NTKNKPLNFNYSLDKIIVDYNLQSKITLPNDRTTPVTKGIPYAPEYKSNAASTIEIHNIDDNTIYQYLY
AQKSPTTLQRITMTNSVDDALINSTKIYSYFPSVISKVNQGAQGILFLQWVRDIIDDFTNESSQKTTI
DKISDVSTIVPYIGPALNIVKQGYEGNFIGALETTGVVLLLEYIPEITLPVIAALSIAESSTQKEKIIKTI
DNFLEKRYEKWIEVYKLVKAKWLGTVNTQFQKRSYQMYRSLEYQVDAIKKIIDYEYKIYSGPDKE
QIADEINNLKNKLEEKANKAMININIFMRESSRSFLVNQMINEAKKQLLEFDTQSKNILMQYIKANS
KFIGITELKKLESKINKVFSTPIPFSYSKNLDCWVDNEEDIDV
SEQ ID42 CP-UTS-A fusion
EFVNKQFNYKDPVNGVDIAYIKIPNAGQMQPVKAFKIHNKIWVIPERDTFTNPEEGDLNPPPEAKQ
VPVSYYDSTYLSTDNEKDNYLKGVTKLFERIYSTDLGRMLLTSIVRGIPFWGGSTIDTELKVIDTNC
INVIQPDGSYRSEELNLVIIGPSADIIQFECKSFGHEVLNLTRNGYGSTQYIRFSPDFTFGFEESLE
VDTNPLLGAGKFATDPAVTLAHELIHAGHRLYGIAINPNRVFKVNTNAYYEMSGLEVSFEELRTFG
GHDAKFIDSLQENEFRLYYYNKFKDIASTLNKAKSIVGTTASLQYMKNVFKEKYLLSEDTSGKFSV
DKLKFDKLYKMLTEIYTEDNFVKFFKVLNRKTYLNFDKAVFKINIVPKVNYTIYDGFNLRNTNLAAN
FNGQNTEINNMNFTKLKNFTGLFEFYKLLCVDGGGGSADDDDKNDDPPISIDLTFHLLRNMIEMA
RIENEREQAGLNRKYLDEVALAGGGGSGGGGSGGGGSALVLQCIKVNNWDLFFSPSEDNFTND
LNKGEEITSDTNlEAAEENISLDLIQQYYLTFNFDNEPENISIENLSSDIIGQLELMPNIERFPNGKKY
ELDKYTMFHYLRAQEFEHGKSRIALTNSVNEALLNPSRVYTFFSSDYVKKVNKATEAAMFLGWV
EQLVYDFTDETSEVSTTDKIADITIIIPYIGPALNIGNMLYKDDFVGALIFSGAVILLEFIPEIAIPVLGT
FALVSYIANKVLTVQTIDNALSKRNEKWDEVYKYIVTNWLAKVNTQIDLIRKKMKEALENQAEATK
AIINYQYNQYTEEEKNNINFNIDDLSSKLNESINKAMININKFLNQCSVSYLMNSMIPYGVKRLEDF
DASLKDALLKYIYDNRGTLIGQVDRLKDKVNNTLSTDIPFQLSKYVDNQRLLST
SEQ ID43 CP-hTGF-B GS10-NS fusion
PVTINNFNYNDPIDNNNIIMMEPPFARGTGRYYKAFKITDRIWIIPERYTFGYKPEDFNKSSGIFNR
DVCEYYDPDYLNTNDKKNIFLQTMIKLFNRIKSKPLGEKLLEMIINGIPYLGDRRVPLEEFNTNIASV
TVNKLISNPGEVERKKGIFANLIIFGPGPVLNENETIDIGIQNHFASREGFGGIMQMKFCPEYVSVF
NNVQENKGASIFNRRGYFSDPALILMHELIHVLHGLYGIKVDDLPIVPNEKKFFMQSTDAIQAEELY
TFGGQDPSIITPSTDKSIYDKVLQNFRGIVDRLNKVLVCISDPNININIYKNKFKDKYKFVEDSEGKY
SIDVESFDKLYKSLMFGFTETNIAENYKIKTRASYFSDSLPPVKIKNLLDNEIYTIEEGFNISDKDME
KEYRGQNKAINKQAYEEISKEHLAVYKIQMCVDGGGGSGGGGSADDDDKVVSHFNDCPDSHTQ
FCFHGTCRFLVQEDKPACVCHSGYVGARCEHADLLAALAKRLVLQCIDVDNEDLFFIADKNSFSD
DLSKNERIEYNTQSNYIENDFPINELILDTDLISKIELPSENTESLTDFNVDVPVYEKQPAIKKIFTDE
NTIFQYLYSQTFPLDIRDISLTSSFDDALLFSNKVYSFFSMDYIKTANKVVEAGLFAGWVKQIVNDF
VIEANKSNTMDAIADISLIVPYIGLALNVGNETAKGNFENAFEIAGASILLEFIPELLIPVVGAFLLESY
IDNKNKIIKTIDNALTKRNEKWSDMYGLIVAQWLSTVNTQFYTIKEGMYKALNYQAQALEEIIKYRY
NIYSEKEKSNINIDFNDINSKLNEGINQAIDNINNFINGCSVSYLMKKMIPLAVEKLLDFDNTLKKNLL
NYIDENKLYLIGSAEYEKSKVNKYLKTIMPFDLSIYTNDTILIEMFNKYNS
SEQ ID44 CP-hTGF-B GS10-GS20 fusion
PVTINNFNYNDPIDNNNIIMMEPPFARGTGRYYKAFKITDRIWIIPERYTFGYKPEDFNKSSGIFNR
DVCEYYDPDYLNTNDKKNIFLQTMIKLFNRIKSKPLGEKLLEMIINGIPYLGDRRVPLEEFNTNIASV
TVNKLISNPGEVERKKGIFANLIIFGPGPVLNENETIDIGIQNHFASREGFGGIMQMKFCPEYVSVF
NNVQENKGASIFNRRGYFSDPALILMHELIHVLHGLYGIKVDDLPIVPNEKKFFMQSTDAIQAEELY
TFGGQDPSIITPSTDKSIYDKVLQNFRGIVDRLNKVLVCISDPNININIYKNKFKDKYKFVEDSEGKY
SIDVESFDKLYKSLMFGFTETNIAENYKIKTRASYFSDSLPPVKIKNLLDNEIYTIEEGFNISDKDME
KEYRGQNKAINKQAYEEISKEHLAVYKIQMCVDGGGGSGGGGSADDDDKVVSHFNDCPDSHTQ
FCFHGTCRFLVQEDKPACVCHSGYVGARCEHADLLAALAGGGGSGGGGSGGGGSALVLQCID
VDNEDLFFIADKNSFSDDLSKNERIEYNTQSNYIENDFPINELILDTDLISKIELPSENTESLTDFNV
DVPVYEKQPAIKKIFTDENTIFQYLYSQTFPLDIRDISLTSSFDDALLFSNKVYSFFSMDYIKTANKV
VEAGLFAGWVKQIVNDFVIEANKSNTMDAIADISLIVPYIGLALNVGNETAKGNFENAFEIAGASILL
EFIPELLIPVVGAFLLESYIDNKNKIIKTIDNALTKRNEKWSDMYGLIVAQWLSTVNTQFYTIKEGMY
KALNYQAQALEEIIKYRYNIYSEKEKSNINIDFNDINSKLNEGINQAIDNINNFINGCSVSYLMKKMIP
LAVEKLLDFDNTLKKNLLNYIDENKLYLIGSAEYEKSKVNKYLKTIMPFDLSIYTNDTILIEMFNKYNS
SEQ ID45 Protein sequence of LH_{N}/A
EFVNKQFNYKDPVNGVDIAYIKIPNAGQMQPVKAFKIHNKIWVIPERDTFTNPEEGDLNPPPEAKQ
VPVSYYDSTYLSTDNEKDNYLKGVTKLFERIYSTDLGRMLLTSIVRGIPFWGGSTIDTELKVIDTNC
INVIQPDGSYRSEELNLVIIGPSADIIQFECKSFGHEVLNLTRNGYGSTQYIRFSPDFTFGFEESLE
VDTNPLLGAGKFATDPAVTLAHELIHAGHRLYGIAINPNRVFKVNTNAYYEMSGLEVSFEELRTFG
GHDAKFIDSLQENEFRLYYYNKFKDIASTLNKAKSIVGTTASLQYMKNVFKEKYLLSEDTSGKFSV
DKLKFDKLYKMLTEIYTEDNFVKFFKVLNRKTYLNFDKAVFKINIVPKVNYTIYDGFNLRNTNLAAN
FNGQNTEINNMNFTKLKNFTGLFEFYKLLCVDGIITSKTKSDDDDKNKALNLQCIKVNNWDLFFSP
SEDNFTNDLNKGEEITSDTNIEAAEENISLDLIQQYYLTFNFDNEPENISIENLSSDIIGQLELMPNIE
RFPNGKKYELDKYTMFHYLRAQEFEHGKSRIALTNSVNEALLNPSRVYTFFSSDYVKKVNKATEA
AMFLGWVEQLVYDFTDETSEVSTTDKIADITIIIPYIGPALNIGNMLYKDDFVGALIFSGAVILLEFIPE
IAIPVLGTFALVSYIANKVLTVQTIDNALSKRNEKWDEVYKYIVTNWLAKVNTQIDLIRKKMKEALEN
QAEATKAIINYQYNQYTEEEKNNINFNIDDLSSKLNESINKAMININKFLNQCSVSYLMNSMIPYGV
KRLEDFDASLKDALLKYIYDNRGTLIGQVDRLKDKVNNTLSTDIPFQLSKYVDNQRLLST
SEQ ID46 Protein sequence of LH_{N}/B
PVTINNFNYNDPIDNNNIIMMEPPFARGTGRYYKAFKITDRIWIIPERYTFGYKPEDFNKSSGIFNR
DVCEYYDPDYLNTNDKKNIFLQTMIKLFNRIKSKPLGEKLLEMIINGIPYLGDRRVPLEEFNTNIASV
TVNKLISNPGEVERKKGIFANLIIFGPGPVLNENETIDIGIQNHFASREGFGGIMQMKFCPEYVSVF
NNVQENKGASIFNRRGYFSDPALILMHELIHVLHGLYGIKVDDLPIVPNEKKFFMQSTDAIQAEELY
TFGGQDPSIITPSTDKSIYDKVLQNFRGIVDRLNKVLVCISDPNININIYKNKFKDKYKFVEDSEGKY
SIDVESFDKLYKSLMFGFTETNIAENYKIKTRASYFSDSLPPVKIKNLLDNEIYTIEEGFNISDKDME
KEYRGQNKAINKQAYEEISKEHLAVYKIQMCVDEEKLYDDDDKDRWGSSLQCIDVDNEDLFFIAD
KNSFSDDLSKNERIEYNTQSNYIENDFPINELILDTDLISKIELPSENTESLTDFNVDVPVYEKQPAI
KKIFTDENTIFQYLYSQTFPLDIRDISLTSSFDDALLFSNKVYSFFSMDYIKTANKVVEAGLFAGWV
KQIVNDFVIEANKSNTMDAIADISLIVPYIGLALNVGNETAKGNFENAFEIAGASILLEFIPELLIPVVG
AFLLESYIDNKNKIIKTIDNALTKRNEKWSDMYGLIVAQWLSTVNTQFYTIKEGMYKALNYQAQAL
EEIIKYRYNIYSEKEKSNINIDFNDINSKLNEGINQAIDNINNFINGCSVSYLMKKMIPLAVEKLLDFD
NTLKKNLLNYIDENKLYLIGSAEYEKSKVNKYLKTIMPFDLSIYTNDTILIEMFNKYNS
SEQ ID47 Protein sequence of LH_{N}/C
PITINNFNYSDPVDNKNILYLDTHLNTLANEPEKAFRITGNIWVIPDRFSRNSNPNLNKPPRVTSPK
SGYYDPNYLSTDSDKDTFLKEIIKLFKRINSREIGEELIYRLSTDIPFPGNNNTPINTFDFDVDFNSV
DVKTRQGNNWVKTGSINPSVIITGPRENIIDPETSTFKLTNNTFAAQEGFGALSIISISPRFMLTYSN
ATNDVGEGRFSKSEFCMDPILILMHELNHAMHNLYGIAIPNDQTISSVTSNIFYSQYNVKLEYAEIY
AFGGPTIDLIPKSARKYFEEKALDYYRSIAKRLNSITTANPSSFNKYIGEYKQKLIRKYRFVVESSG
EVTVNRNKFVELYNELTQIFTEFNYAKIYNVQNRKIYLSNVYTPVTANILDDNVYDIQNGFNIPKSN
LNVLFMGQNLSRNPALRKVNPENMLYLFTKFCVDAIDGRSLYNKTLQCRELLVKNTDLPFIGDISD
VKTDIFLRKDINEETEVIYYPDNVSVDQVILSKNTSEHGQLDLLYPSIDSESEILPGENQVFYDNRT
QNVDYLNSYYYLESQKLSDNVEDFTFTRSIEEALDNSAKVYTYFPTLANKVNAGVQGGLFLMWA
NDVVEDFTTNILRKDTLDKISDVSAIIPYIGPALNISNSVRRGNFTEAFAVTGVTILLEAFPEFTIPAL
GAFVIYSKVQERNEIIKTIDNCLEQRIKRWKDSYEWMMGTWLSRIITQFNNISYQMYDSLNYQAG
AIKAKIDLEYKKYSGSDKENIKSQVENLKNSLDVKISEAMNNINKFIRECSVTYLFKNMLPKVIDELN
EFDRNTKAKLINLIDSHNIILVGEVDKLKAKVNNSFQNTIPFNIFSYTNNSLLKDIINEYFN
SEQ ID48 Protein sequence of LH_{N}/D
TWPVKDFNYSDPVNDNDILYLRIPQNKLITTPVKAFMITQNIWVIPERFSSDTNPSLSKPPRPTSKY
QSYYDPSYLSTDEQKDTFLKGIIKLFKRINERDIGKKLINYLVVGSPFMGDSSTPEDTFDFTRHTTN
IAVEKFENGSWKVTNIITPSVLIFGPLPNILDYTASLTLQGQQSNPSFEGFGTLSILKVAPEFLLTFS
DVTSNQSSAVLGKSIFCMDPVIALMHELTHSLHQLYGINIPSDKRIRPQVSEGFFSQDGPNVQFE
ELYTFGGLDVEIIPQIERSQLREKALGHYKDIAKRLNNINKTIPSSWISNIDKYKKIFSEKYNFDKDN
TGNFVVNIDKFNSLYSDLTNVMSEVVYSSQYNVKNRTHYFSRHYLPVFANILDDNIYTIRDGFNLT
NKGFNIENSGQNIERNPALQKLSSESVVDLFTKVCVDKSEEKLYDDDDKDRWGSSLQCIKVKNN
RLPYVADKDSISQEIFENKIITDETNVQNYSDKFSLDESILDGQVPINPEIVDPLLPNVNMEPLNLPG
EEIVFYDDITKYVDYLNSYYYLESQKLSNNVENITLTTSVEEALGYSNKIYTFLPSLAEKVNKGVQA
GLFLNWANEVVEDFTTNIMKKDTLDKISDVSVIIPYIGPALNIGNSALRGNFNQAFATAGVAFLLEG
FPEFTIPALGVFTFYSSIQEREKIIKTIENCLEQRVKRWKDSYQWMVSNWLSRITTQFNHINYQMY
DSLSYQADAIKAKIDLEYKKYSGSDKENIKSQVENLKNSLDVKISEAMNNINKFIRECSVTYLFKNM
LPKVIDELNKFDLRTKTELINLIDSHNIILVGEVDRLKAKVNESFENTMPFNIFSYTNNSLLKDIINEY
FN
SEQ ID49 Protein sequence of IgA-H_{N}tet
ESNQPEKNGTATKPENSGNTTSENGQTEPEKKLELRNVSDIELYSQTNGTYRQHVSLDGIPENT
DTYFVKVKSSAFKDVYIPVASITEEKRNGQSVYKITAKAEKLQQELENKYVDNFTFYLDKKAKEEN
TNFTSFSNLVKAINQNPSGTYHLAASLNANEVELGPDERSYIKDTFTGRLIGEKDGKNYAIYNLKK
PLFENLSGATVEKLSLKNVAISGKNDIGSLANEATNGTKIKQVHVDGCVDGIITSKTKSDDDDKNK
ALNLQCIKIKNEDLTFIAEKNSFSEEPFQDEIVSYNTKNKPLNFNYSLDKIIVDYNLQSKITLPNDRT
TPVTKGIPYAPEYKSNAASTIEIHNIDDNTIYQYLYAQKSPTTLQRITMTNSVDDALINSTKIYSYFP
SVISKVNQGAQGILFLQWVRDIIDDFTNESSQKTTIDKISDVSTIVPYIGPALNIVKQGYEGNFIGAL
ETTGVVLLLEYIPEITLPVIAALSIAESSTQKEKIIKTIDNFLEKRYEKWIEVYKLVKAKWLGTVNTQF
QKRSYQMYRSLEYQVDAIKKIIDYEYKIYSGPDKEQIADEINNLKNKLEEKANKAMININIFMRESS
RSFLVNQMINEAKKQLLEFDTQSKNILMQYIKANSKFIGITELKKLESKINKVFSTPIPFSYSKNLDC
WVDNEEDIDV
SEQ ID50 Synthesised Octreotide peptide
Cys-Dphe-Cys-Phe-Dtrp-Lys-Thr-Cys-Thr-ol
SEQ ID51 Synthesised GHRH agonist peptide
HIS-ALA-ASP-ALA-ILE-PHE-THR-ASN-SER-TYR-ARG-LYS-VAL-LEU-GLY-GLN-LEU-SER-
ALA-ARG-LYS-LEU-LEU-GLN-ASP-ILE-NLE-SER-ARG-CYS
SEQ ID52 Synthesised GHRH antagonist peptide
PhAc-Tyr-D-Arg-Asp-Ala-IIe-Phe(4-Cl)-Thr-Ala-Har-Tyr(Me)-His-Lys-Val-Leu-
Abu-Gln-Leu-Ser-Ala-His-Lys-Leu-Leu-Gln-Asp-Ile-Nle-D-Arg-Har-CYS
SEQ ID53 Protein sequence of CP-MCH-D fusion
TWPVKDFNYSDPVNDNDILYLRIPQNKLITTPVKAFMITQNIWVIPERFSSDTNPSLSKPPRPTSKYQ
SYYDPSYLSTDEQKDTFLKGIIKLFKRINERDIGKKLINYLVVGSPFMGDSSTPEDTFDFTRHTTNIAV
EKFENGSWKVTNIITPSVLIFGPLPNILDYTASLTLQGQQSNPSFEGFGTLSILKVAPEFLLTFSDVTS
NQSSAVLGKSIFCMDPVIALMHELTHSLHQLYGINIPSDKRIRPQVSEGFFSQDGPNVQFEELYTFG
GLDVEIIPQIERSQLREKALGHYKDIAKRLNNINKTIPSSWISNIDKYKKIFSEKYNFDKDNTGNFVVNI
DKFNSLYSDLTNVMSEVVYSSQYNVKNRTHYFSRHYLPVFANILDDNIYTIRDGFNLTNKGFNIENS
GQNIERNPALQKLSSESVVDLFTKVCVDGIITSKTKSDDDDKDFDMLRCMLGRVYRPCWQVALAKR
LVLQCIKVKNNRLPYVADKDSISQEIFENKIITDETNVQNYSDKFSLDESILDGQVPINPEIVDPLLPNV
NMEPLNLPGEEIVFYDDITKYVDYLNSYYYLESQKLSNNVENITLTTSVEEALGYSNKIYTFLPSLAEK
VNKGVQAGLFLNWANEVVEDFTTNIMKKDTLDKISDVSVIIPYIGPALNIGNSALRGNFNQAFATAGV
AFLLEGFPEFTIPALGVFTFYSSIQEREKIIKTIENCLEQRVKRWKDSYQWMVSNWLSRITTQFNHIN
YQMYDSLSYQADAIKAKIDLEYKKYSGSDKENIKSQVENLKNSLDVKISEAMNNINKFIRECSVTYLF
KNMLPKVIDELNKFDLRTKTELINLIDSHNIILVGEVDRLKAKVNESFENTMPFNIFSYTNNSLLKDIINE
YFN
SEQ ID54 Protein sequence of KISS-D fusion
TWPVKDFNYSDPVNDNDILYLRIPQNKLITTPVKAFMITQNIWVIPERFSSDTNPSLSKPPRPTSKYQ
SYYDPSYLSTDEQKDTFLKGIIKLFKRINERDIGKKLINYLVVGSPFMGDSSTPEDTFDFTRHTTNIAV
EKFENGSWKVTNIITPSVLIFGPLPNILDYTASLTLQGQQSNPSFEGFGTLSILKVAPEFLLTFSDVTS
NQSSAVLGKSIFCMDPVIALMHELTHSLHQLYGINIPSDKRIRPQVSEGFFSQDGPNVQFEELYTFG
GLDVEIIPQIERSQLREKALGHYKDIAKRLNNINKTIPSSWISNIDKYKKIFSEKYNFDKDNTGNFVVNI
DKFNSLYSDLTNVMSEVVYSSQYNVKNRTHYFSRHYLPVFANILDDNIYTIRDGFNLTNKGFNIENS
GQNIERNPALQKLSSESVVDLFTKVCVDKSEEKLYDDDDKDRWGSSLQCIKVKNNRLPYVADKDSI
SQEIFENKIITDETNVQNYSDKFSLDESILDGQVPINPEIVDPLLPNVNMEPLNLPGEEIVFYDDITKYV
DYLNSYYYLESQKLSNNVENITLTTSVEEALGYSNKIYTFLPSLAEKVNKGVQAGLFLNWANEVVED
FTTNIMKKDTLDKISDVSVIIPYIGPALNIGNSALRGNFNQAFATAGVAFLLEGFPEFTIPALGVFTFYS
SIQEREKIIKTIENCLEQRVKRWKDSYQWMVSNWLSRITTQFNHINYQMYDSLSYQADAIKAKIDLEY
KKYSGSDKENIKSQVENLKNSLDVKISEAMNNINKFIRECSVTYLFKNMLPKVIDELNKFDLRTKTELI
NLIDSHNIILVGEVDRLKAKVNESFENTMPFNIFSYTNNSLLKDIINEYFNLEGGGGSGGGGSGGGG
SALVYNWNSFGLRFG
SEQ ID55 Protein sequence of PrRP-A fusion
EFVNKQFNYKDPVNGVDIAYIKIPNAGQMQPVKAFKIHNKIWVIPERDTFTNPEEGDLNPPPEAKQV
PVSYYDSTYLSTDNEKDNYLKGVTKLFERIYSTDLGRMLLTSIVRGIPFWGGSTIDTELKVIDTNCINV
IQPDGSYRSEELNLVIIGPSADIIQFECKSFGHEVLNLTRNGYGSTQYIRFSPDFTFGFEESLEVDTN
PLLGAGKFATDPAVTLAHELIHAGHRLYGIAINPNRVFKVNTNAYYEMSGLEVSFEELRTFGGHDAK
FIDSLQENEFRLYYYNKFKDIASTLNKAKSIVGTTASLQYMKNVFKEKYLLSEDTSGKFSVDKLKFDK
LYKMLTEIYTEDNFVKFFKVLNRKTYLNFDKAVFKINIVPKVNYTIYDGFNLRNTNLAANFNGQNTEIN
NMNFTKLKNFTGLFEFYKLLCVDGIITSKTKSDDDDKNKALNLQCIKVNNWDLFFSPSEDNFTNDLN
KGEEITSDTNIEAAEENISLDLIQQYYLTFNFDNEPENISIENLSSDIIGQLELMPNIERFPNGKKYELD
KYTMFHYLRAQEFEHGKSRIALTNSVNEALLNPSRVYTFFSSDYVKKVNKATEAAMFLGWVEQLVY
DFTDETSEVSTTDKIADITIIIPYIGPALNIGNMLYKDDFVGALIFSGAVILLEFIPEIAIPVLGTFALVSYIA
NKVLTVQTIDNALSKRNEKWDEVYKYIVTNWLAKVNTQIDLIRKKMKEALENQAEATKAIINYQYNQY
TEEEKNNINFNIDDLSSKLNESINKAMININKFLNQCSVSYLMNSMIPYGVKRLEDFDASLKDALLKYI
YDNRGTLIGQVDRLKDKVNNTLSTDIPFQLSKYVDNQRLLSTLEGGGGSGGGGSGGGGSALVTPD
INPAWYASRGIRPVGRFG
SEQ ID56 Protein sequence of CP-CRH-C fusion
PITINNFNYSDPVDNKNILYLDTHLNTLANEPEKAFRITGNIWVIPDRFSRNSNPNLNKPPRVTSPK
SGYYDPNYLSTDSDKDTFLKEIIKLFKRINSREIGEELIYRLSTDIPFPGNNNTPINTFDFDVDFNSV
DVKTRQGNNWVKTGSINPSVIITGPRENIIDPETSTFKLTNNTFAAQEGFGALSIISISPRFMLTYSN
ATNDVGEGRFSKSEFCMDPILILMHELNHAMHNLYGIAIPNDQTISSVTSNIFYSQYNVKLEYAEIY
AFGGPTIDLIPKSARKYFEEKALDYYRSIAKRLNSITTANPSSFNKYIGEYKQKLIRKYRFVVESSG
EVTVNRNKFVELYNELTQIFTEFNYAKIYNVQNRKIYLSNVYTPVTANILDDNVYDIQNGFNIPKSN
LNVLFMGQNLSRNPALRKVNPENMLYLFTKFCVDGGGGSADDDDKSEEPPISLDLTFHLLREVL
EMARAEQLAQQAHSNRKLMEIIALAGGGGSGGGGSGGGGSALVLQCRELLVKNTDLPFIGDISD
VKTDIFLRKDINEETEVIYYPDNVSVDQVILSKNTSEHGQLDLLYPSIDSESEILPGENQVFYDNRT
QNVDYLNSYYYLESQKLSDNVEDFTFTRSIEEALDNSAKVYTYFPTLANKVNAGVQGGLFLMWA
NDVVEDFTTNILRKDTLDKISDVSAIIPYIGPALNISNSVRRGNFTEAFAVTGVTILLEAFPEFTIPAL
GAFVIYSKVQERNEIIKTIDNCLEQRIKRWKDSYEWMMGTWLSRIITQFNNISYQMYDSLNYQAG
AIKAKIDLEYKKYSGSDKENIKSQVENLKNSLDVKISEAMNNINKFIRECSVTYLFKNMLPKVIDELN
EFDRNTKAKLINLIDSHNIILVGEVDKLKAKVNNSFQNTIPFNIFSYTNNSLLKDIINEYFN
SEQ ID57 Protein sequence of CP-HS_GHRH_1-27-LHD fusion
TWPVKDFNYSDPVNDNDILYLRIPQNKLITTPVKAFMITQNIWVIPERFSSDTNPSLSKPPRPTSKYQ
SYYDPSYLSTDEQKDTFLKGIIKLFKRINERDIGKKLINYLVVGSPFMGDSSTPEDTFDFTRHTTNIAV
EKFENGSWKVTNIITPSVLIFGPLPNILDYTASLTLQGQQSNPSFEGFGTLSILKVAPEFLLTFSDVTS
NQSSAVLGKSIFCMDPVIALMHELTHSLHQLYGINIPSDKRIRPQVSEGFFSQDGPNVQFEELYTFG
GLDVEIIPQIERSQLREKALGHYKDIAKRLNNINKTIPSSWISNIDKYKKIFSEKYNFDKDNTGNFVVNI
DKFNSLYSDLTNVMSEVVYSSQYNVKNRTHYFSRHYLPVFANILDDNIYTIRDGFNLTNKGFNIENS
GQNIERNPALQKLSSESVVDLFTKVCVDGIITSKTKSDDDDKYADAIFTNSYRKVLGQLSARKLLQDI
MALAGGGGSGGGGSGGGGSALALQCIKVKNNRLPYVADKDSISQEIFENKIITDETNVQNYSDKFS
LDESILDGQVPINPEIVDPLLPNVNMEPLNLPGEEIVFYDDITKYVDYLNSYYYLESQKLSNNVENITL
TTSVEEALGYSNKIYTFLPSLAEKVNKGVQAGLFLNWANEVVEDFTTNIMKKDTLDKISDVSVIIPYIG
PALNIGNSALRGNFNQAFATAGVAFLLEGFPEFTIPALGVFTFYSSIQEREKIIKTIENCLEQRVKRWK
DSYQWMVSNWLSRITTQFNHINYQMYDSLSYQADAIKAKIDLEYKKYSGSDKENIKSQVENLKNSL
DVKISEAMNNINKFIRECSVTYLFKNMLPKVIDELNKFDLRTKTELINLIDSHNIILVGEVDRLKAKVNE
SFENTMPFNIFSYTNNSLLKDIINEYFN
SEQ ID58 Protein sequence of the CP-HS_GHRH_1-28-LHD fusion
TWPVKDFNYSDPVNDNDILYLRIPQNKLITTPVKAFMITQNIWVIPERFSSDTNPSLSKPPRPTSKYQ
SYYDPSYLSTDEQKDTFLKGIIKLFKRINERDIGKKLINYLVVGSPFMGDSSTPEDTFDFTRHTTNIAV
EKFENGSWKVTNIITPSVLIFGPLPNILDYTASLTLQGQQSNPSFEGFGTLSILKVAPEFLLTFSDVTS
NQSSAVLGKSIFCMDPVIALMHELTHSLHQLYGINIPSDKRIRPQVSEGFFSQDGPNVQFEELYTFG
GLDVEIIPQIERSQLREKALGHYKDIAKRLNNINKTIPSSWISNIDKYKKIFSEKYNFDKDNTGNFVVNI
DKFNSLYSDLTNVMSEVVYSSQYNVKNRTHYFSRHYLPVFANILDDNIYTIRDGFNLTNKGFNIENS
GQNIERNPALQKLSSESVVDLFTKVCVDGIITSKTKSDDDDKYADAIFTNSYRKVLGQLSARKLLQDI
MSALAGGGGSGGGGSGGGGSALALQCIKVKNNRLPYVADKDSISQEIFENKIITDETNVQNYSDKF
SLDESILDGQVPINPEIVDPLLPNVNMEPLNLPGEEIVFYDDITKYVDYLNSYYYLESQKLSNNVENIT
LTTSVEEALGYSNKIYTFLPSLAEKVNKGVQAGLFLNWANEVVEDFTTNIMKKDTLDKISDVSVIIPYI
GPALNIGNSALRGNFNQAFATAGVAFLLEGFPEFTIPALGVFTFYSSIQEREKIIKTIENCLEQRVKRW
KDSYQWMVSNWLSRITTQFNHINYQMYDSLSYQADAIKAKIDLEYKKYSGSDKENIKSQVENLKNS
LDVKISEAMNNINKFIRECSVTYLFKNMLPKVIDELNKFDLRTKTELINLIDSHNIILVGEVDRLKAKVN
ESFENTMPFNIFSYTNNSLLKDIINEYFN
SEQ ID59 Protein sequence of the CP-HS_GHRH_1-29-LHD fusion
TWPVKDFNYSDPVNDNDILYLRIPQNKLITTPVKAFMITQNIWVIPERFSSDTNPSLSKPPRPTSKYQ
SYYDPSYLSTDEQKDTFLKGIIKLFKRINERDIGKKLINYLVVGSPFMGDSSTPEDTFDFTRHTTNIAV
EKFENGSWKVTNIITPSVLIFGPLPNILDYTASLTLQGQQSNPSFEGFGTLSILKVAPEFLLTFSDVTS
NQSSAVLGKSIFCMDPVIALMHELTHSLHQLYGINIPSDKRIRPQVSEGFFSQDGPNVQFEELYTFG
GLDVEIIPQIERSQLREKALGHYKDIAKRLNNINKTIPSSWISNIDKYKKIFSEKYNFDKDNTGNFVVNI
DKFNSLYSDLTNVMSEVVYSSQYNVKNRTHYFSRHYLPVFANILDDNIYTIRDGFNLTNKGFNIENS
GQNIERNPALQKLSSESVVDLFTKVCVDGIITSKTKSDDDDKYADAIFTNSYRKVLGQLSARKLLQDI
MSRALAGGGGSGGGGSGGGGSALALQCIKVKNNRLPYVADKDSISQEIFENKIITDETNVQNYSDK
FSLDESILDGQVPINPEIVDPLLPNVNMEPLNLPGEEIVFYDDITKYVDYLNSYYYLESQKLSNNVENI
TLTTSVEEALGYSNKIYTFLPSLAEKVNKGVQAGLFLNWANEVVEDFTTNIMKKDTLDKISDVSVIIPY
IGPALNIGNSALRGNFNQAFATAGVAFLLEGFPEFTIPALGVFTFYSSIQEREKIIKTIENCLEQRVKR
WKDSYQWMVSNWLSRITTQFNHINYQMYDSLSYQADAIKAKIDLEYKKYSGSDKENIKSQVENLKN
SLDVKISEAMNNINKFIRECSVTYLFKNMLPKVIDELNKFDLRTKTELINLIDSHNIILVGEVDRLKAKV
NESFENTMPFNIFSYTNNSLLKDIINEYFN
SEQ ID60 Protein sequence of the CP-HS_GHRH_1-44-LHD fusion
TWPVKDFNYSDPVNDNDILYLRIPQNKLITTPVKAFMITQNIWVIPERFSSDTNPSLSKPPRPTSKYQ
SYYDPSYLSTDEQKDTFLKGIIKLFKRINERDIGKKLINYLVVGSPFMGDSSTPEDTFDFTRHTTNIAV
EKFENGSWKVTNIITPSVLIFGPLPNILDYTASLTLQGQQSNPSFEGFGTLSILKVAPEFLLTFSDVTS
NQSSAVLGKSIFCMDPVIALMHELTHSLHQLYGINIPSDKRIRPQVSEGFFSQDGPNVQFEELYTFG
GLDVEIIPQIERSQLREKALGHYKDIAKRLNNINKTIPSSWISNIDKYKKIFSEKYNFDKDNTGNFVVNI
DKFNSLYSDLTNVMSEVVYSSQYNVKNRTHYFSRHYLPVFANILDDNIYTIRDGFNLTNKGFNIENS
GQNIERNPALQKLSSESVVDLFTKVCVDGIITSKTKSDDDDKYADAIFTNSYRKVLGQLSARKLLQDI
MSRQQGESNQERGARARLALAGGGGSGGGGSGGGGSALALQCIKVKNNRLPYVADKDSISQEIF
ENKIITDETNVQNYSDKFSLDESILDGQVPINPEIVDPLLPNVNMEPLNLPGEEIVFYDDITKYVDYLN
SYYYLESQKLSNNVENITLTTSVEEALGYSNKIYTFLPSLAEKVNKGVQAGLFLNWANEVVEDFTTNI
MKKDTLDKISDVSVIIPYIGPALNIGNSALRGNFNQAFATAGVAFLLEGFPEFTIPALGVFTFYSSIQER
EKIIKTIENCLEQRVKRWKDSYQWMVSNWLSRITTQFNHINYQMYDSLSYQADAIKAKIDLEYKKYS
GSDKENIKSQVENLKNSLDVKISEAMNNINKFIRECSVTYLFKNMLPKVIDELNKFDLRTKTELINLIDS
HNIILVGEVDRLKAKVNESFENTMPFNIFSYTNNSLLKDIINEYFN
SEQ ID61 Protein sequence of the CP-HS_GHRH_1-40-LHD fusion
TWPVKDFNYSDPVNDNDILYLRIPQNKLITTPVKAFMITQNIWVIPERFSSDTNPSLSKPPRPTSKYQ
SYYDPSYLSTDEQKDTFLKGIIKLFKRINERDIGKKLINYLVVGSPFMGDSSTPEDTFDFTRHTTNIAV
EKFENGSWKVTNIITPSVLIFGPLPNILDYTASLTLQGQQSNPSFEGFGTLSILKVAPEFLLTFSDVTS
NQSSAVLGKSIFCMDPVIALMHELTHSLHQLYGINIPSDKRIRPQVSEGFFSQDGPNVQFEELYTFG
GLDVEIIPQIERSQLREKALGHYKDIAKRLNNINKTIPSSWISNIDKYKKIFSEKYNFDKDNTGNFVVNI
DKFNSLYSDLTNVMSEVVYSSQYNVKNRTHYFSRHYLPVFANILDDNIYTIRDGFNLTNKGFNIENS
GQNIERNPALQKLSSESVVDLFTKVCVDGIITSKTKSDDDDKYADAIFTNSYRKVLGQLSARKLLQDI
MSRQQGESNQERGALAGGGGSGGGGSGGGGSALALQCIKVKNNRLPYVADKDSISQEIFENKIIT
DETNVQNYSDKFSLDESILDGQVPINPEIVDPLLPNVNMEPLNLPGEEIVFYDDITKYVDYLNSYYYL
ESQKLSNNVENITLTTSVEEALGYSNKIYTFLPSLAEKVNKGVQAGLFLNWANEVVEDFTTNIMKKD
TLDKISDVSVIIPYIGPALNIGNSALRGNFNQAFATAGVAFLLEGFPEFTIPALGVFTFYSSIQEREKIIK
TIENCLEQRVKRWKDSYQWMVSNWLSRITTQFNHINYQMYDSLSYQADAIKAKIDLEYKKYSGSDK
ENIKSQVENLKNSLDVKISEAMNNINKFIRECSVTYLFKNMLPKVIDELNKFDLRTKTELINLIDSHNIIL
VGEVDRLKAKVNESFENTMPFNIFSYTNNSLLKDIINEYFN
SEQ ID62 Protein sequence of the CP-HS_GHRH_Ala9-LHD fusion
TWPVKDFNYSDPVNDNDILYLRIPQNKLITTPVKAFMITQNIWVIPERFSSDTNPSLSKPPRPTSKYQ
SYYDPSYLSTDEQKDTFLKGIIKLFKRINERDIGKKLINYLVVGSPFMGDSSTPEDTFDFTRHTTNIAV
EKFENGSWKVTNIITPSVLIFGPLPNILDYTASLTLQGQQSNPSFEGFGTLSILKVAPEFLLTFSDVTS
NQSSAVLGKSIFCMDPVIALMHELTHSLHQLYGINIPSDKRIRPQVSEGFFSQDGPNVQFEELYTFG
GLDVEIIPQIERSQLREKALGHYKDIAKRLNNINKTIPSSWISNIDKYKKIFSEKYNFDKDNTGNFVVNI
DKFNSLYSDLTNVMSEVVYSSQYNVKNRTHYFSRHYLPVFANILDDNIYTIRDGFNLTNKGFNIENS
GQNIERNPALQKLSSESVVDLFTKVCVDGIITSKTKSDDDDKYADAIFTNAYRKVLGQLSARKLLQDI
MSRALAGGGGSGGGGSGGGGSALALQCIKVKNNRLPYVADKDSISQEIFENKIITDETNVQNYSDK
FSLDESILDGQVPINPEIVDPLLPNVNMEPLNLPGEEIVFYDDITKYVDYLNSYYYLESQKLSNNVENI
TLTTSVEEALGYSNKIYTFLPSLAEKVNKGVQAGLFLNWANEVVEDFTTNIMKKDTLDKISDVSVIIPY
IGPALNIGNSALRGNFNQAFATAGVAFLLEGFPEFTIPALGVFTFYSSIQEREKIIKTIENCLEQRVKR
WKDSYQWMVSNWLSRITTQFNHINYQMYDSLSYQADAIKAKIDLEYKKYSGSDKENIKSQVENLKN
SLDVKISEAMNNINKFIRECSVTYLFKNMLPKVIDELNKFDLRTKTELINLIDSHNIILVGEVDRLKAKV
NESFENTMPFNIFSYTNNSLLKDIINEYFN
SEQ ID63 Protein sequence of the CP-HS_GHRH_Ala22-LHD fusion
TWPVKDFNYSDPVNDNDILYLRIPQNKLITTPVKAFMITQNIWVIPERFSSDTNPSLSKPPRPTSKYQ
SYYDPSYLSTDEQKDTFLKGIIKLFKRINERDIGKKLINYLVVGSPFMGDSSTPEDTFDFTRHTTNIAV
EKFENGSWKVTNIITPSVLIFGPLPNILDYTASLTLQGQQSNPSFEGFGTLSILKVAPEFLLTFSDVTS
NQSSAVLGKSIFCMDPVIALMHELTHSLHQLYGINIPSDKRIRPQVSEGFFSQDGPNVQFEELYTFG
GLDVEIIPQIERSQLREKALGHYKDIAKRLNNINKTIPSSWISNIDKYKKIFSEKYNFDKDNTGNFVVNI
DKFNSLYSDLTNVMSEVVYSSQYNVKNRTHYFSRHYLPVFANILDDNIYTIRDGFNLTNKGFNIENS
GQNIERNPALQKLSSESVVDLFTKVCVDGIITSKTKSDDDDKYADAIFTNSYRKVLGQLSARKALQDI
MSRALAGGGGSGGGGSGGGGSALALQCIKVKNNRLPYVADKDSISQEIFENKIITDETNVQNYSDK
FSLDESILDGQVPINPEIVDPLLPNVNMEPLNLPGEEIVFYDDITKYVDYLNSYYYLESQKLSNNVENI
TLTTSVEEALGYSNKIYTFLPSLAEKVNKGVQAGLFLNWANEVVEDFTTNIMKKDTLDKISDVSVIIPY
IGPALNIGNSALRGNFNQAFATAGVAFLLEGFPEFTIPALGVFTFYSSIQEREKIIKTIENCLEQRVKR
WKDSYQWMVSNWLSRITTQFNHINYQMYDSLSYQADAIKAKIDLEYKKYSGSDKENIKSQVENLKN
SLDVKISEAMNNINKFIRECSVTYLFKNMLPKVIDELNKFDLRTKTELINLIDSHNIILVGEVDRLKAKV
NESFENTMPFNIFSYTNNSLLKDIINEYFN
SEQ ID64 Protein sequence CP-HS_GHRH_Ala8_Lys11_1-29-LHD fusion
TWPVKDFNYSDPVNDNDILYLRIPQNKLITTPVKAFMITQNIWVIPERFSSDTNPSLSKPPRPTSKYQ
SYYDPSYLSTDEQKDTFLKGIIKLFKRINERDIGKKLINYLVVGSPFMGDSSTPEDTFDFTRHTTNIAV
EKFENGSWKVTNIITPSVLIFGPLPNILDYTASLTLQGQQSNPSFEGFGTLSILKVAPEFLLTFSDVTS
NQSSAVLGKSIFCMDPVIALMHELTHSLHQLYGINIPSDKRIRPQVSEGFFSQDGPNVQFEELYTFG
GLDVEIIPQIERSQLREKALGHYKDIAKRLNNINKTIPSSWISNIDKYKKIFSEKYNFDKDNTGNFVVNI
DKFNSLYSDLTNVMSEVVYSSQYNVKNRTHYFSRHYLPVFANILDDNIYTIRDGFNLTNKGFNIENS
GQNIERNPALQKLSSESVVDLFTKVCVDGIITSKTKSDDDDKYADAIFTASYKKVLGQLSARKLLQDI
MSRALAGGGGSGGGGSGGGGSALALQCIKVKNNRLPYVADKDSISQEIFENKIITDETNVQNYSDK
FSLDESILDGQVPINPEIVDPLLPNVNMEPLNLPGEEIVFYDDITKYVDYLNSYYYLESQKLSNNVENI
TLTTSVEEALGYSNKIYTFLPSLAEKVNKGVQAGLFLNWANEVVEDFTTNIMKKDTLDKISDVSVIIPY
IGPALNIGNSALRGNFNQAFATAGVAFLLEGFPEFTIPALGVFTFYSSIQEREKIIKTIENCLEQRVKR
WKDSYQWMVSNWLSRITTQFNHINYQMYDSLSYQADAIKAKIDLEYKKYSGSDKENIKSQVENLKN
SLDVKISEAMNNINKFIRECSVTYLFKNMLPKVIDELNKFDLRTKTELINLIDSHNIILVGEVDRLKAKV
NESFENTMPFNIFSYTNNSLLKDIINEYFN
SEQ ID65 Protein CP-HS_GHRH_Ala8_Lys11_Arg12_1-29-LHD fusion
TWPVKDFNYSDPVNDNDILYLRIPQNKLITTPVKAFMITQNIWVIPERFSSDTNPSLSKPPRPTSKYQ
SYYDPSYLSTDEQKDTFLKGIIKLFKRINERDIGKKLINYLVVGSPFMGDSSTPEDTFDFTRHTTNIAV
EKFENGSWKVTNIITPSVLIFGPLPNILDYTASLTLQGQQSNPSFEGFGTLSILKVAPEFLLTFSDVTS
NQSSAVLGKSIFCMDPVIALMHELTHSLHQLYGINIPSDKRIRPQVSEGFFSQDGPNVQFEELYTFG
GLDVEIIPQIERSQLREKALGHYKDIAKRLNNINKTIPSSWISNIDKYKKIFSEKYNFDKDNTGNFVVNI
DKFNSLYSDLTNVMSEVVYSSQYNVKNRTHYFSRHYLPVFANILDDNIYTIRDGFNLTNKGFNIENS
GQNIERNPALQKLSSESVVDLFTKVCVDGIITSKTKSDDDDKYADAIFTASYKRVLGQLSARKLLQDI
MSRALAGGGGSGGGGSGGGGSALALQCIKVKNNRLPYVADKDSISQEIFENKIITDETNVQNYSDK
FSLDESILDGQVPINPEIVDPLLPNVNMEPLNLPGEEIVFYDDITKYVDYLNSYYYLESQKLSNNVENI
TLTTSVEEALGYSNKIYTFLPSLAEKVNKGVQAGLFLNWANEVVEDFTTNIMKKDTLDKISDVSVIIPY
IGPALNIGNSALRGNFNQAFATAGVAFLLEGFPEFTIPALGVFTFYSSIQEREKIIKTIENCLEQRVKR
WKDSYQWMVSNWLSRITTQFNHINYQMYDSLSYQADAIKAKIDLEYKKYSGSDKENIKSQVENLKN
SLDVKISEAMNNINKFIRECSVTYLFKNMLPKVIDELNKFDLRTKTELINLIDSHNIILVGEVDRLKAKV
NESFENTMPFNIFSYTNNSLLKDIINEYFN
SEQ ID66 Protein sequence CP-HS_GHRH_Ala8_Asn11_1-29-LHD fusion
TWPVKDFNYSDPVNDNDILYLRIPQNKLITTPVKAFMITQNIWVIPERFSSDTNPSLSKPPRPTSKYQ
SYYDPSYLSTDEQKDTFLKGIIKLFKRINERDIGKKLINYLVVGSPFMGDSSTPEDTFDFTRHTTNIAV
EKFENGSWKVTNIITPSVLIFGPLPNILDYTASLTLQGQQSNPSFEGFGTLSILKVAPEFLLTFSDVTS
NQSSAVLGKSIFCMDPVIALMHELTHSLHQLYGINIPSDKRIRPQVSEGFFSQDGPNVQFEELYTFG
GLDVEIIPQIERSQLREKALGHYKDIAKRLNNINKTIPSSWISNIDKYKKIFSEKYNFDKDNTGNFVVNI
DKFNSLYSDLTNVMSEVVYSSQYNVKNRTHYFSRHYLPVFANILDDNIYTIRDGFNLTNKGFNIENS
GQNIERNPALQKLSSESVVDLFTKVCVDGIITSKTKSDDDDKYADAIFTASYNKVLGQLSARKLLQDI
MSRALAGGGGSGGGGSGGGGSALALQCIKVKNNRLPYVADKDSISQEIFENKIITDETNVQNYSDK
FSLDESILDGQVPINPEIVDPLLPNVNMEPLNLPGEEIVFYDDITKYVDYLNSYYYLESQKLSNNVENI
TLTTSVEEALGYSNKIYTFLPSLAEKVNKGVQAGLFLNWANEVVEDFTTNIMKKDTLDKISDVSVIIPY
IGPALNIGNSALRGNFNQAFATAGVAFLLEGFPEFTIPALGVFTFYSSIQEREKIIKTIENCLEQRVKR
WKDSYQWMVSNWLSRITTQFNHINYQMYDSLSYQADAIKAKIDLEYKKYSGSDKENIKSQVENLKN
SLDVKISEAMNNINKFIRECSVTYLFKNMLPKVIDELNKFDLRTKTELINLIDSHNIILVGEVDRLKAKV
NESFENTMPFNIFSYTNNSLLKDIINEYFN
SEQ ID67 Protein sequence CP-HS_GHRH_Ala8_Lys20_1-29-LHD fusion
TWPVKDFNYSDPVNDNDILYLRIPQNKLITTPVKAFMITQNIWVIPERFSSDTNPSLSKPPRPTSKYQ
SYYDPSYLSTDEQKDTFLKGIIKLFKRINERDIGKKLINYLVVGSPFMGDSSTPEDTFDFTRHTTNIAV
EKFENGSWKVTNIITPSVLIFGPLPNILDYTASLTLQGQQSNPSFEGFGTLSILKVAPEFLLTFSDVTS
NQSSAVLGKSIFCMDPVIALMHELTHSLHQLYGINIPSDKRIRPQVSEGFFSQDGPNVQFEELYTFG
GLDVEIIPQIERSQLREKALGHYKDIAKRLNNINKTIPSSWISNIDKYKKIFSEKYNFDKDNTGNFVVNI
DKFNSLYSDLTNVMSEVVYSSQYNVKNRTHYFSRHYLPVFANILDDNIYTIRDGFNLTNKGFNIENS
GQNIERNPALQKLSSESVVDLFTKVCVDGIITSKTKSDDDDKYADAIFTASYRKVLGQLSAKKLLQDI
MSRALAGGGGSGGGGSGGGGSALALQCIKVKNNRLPYVADKDSISQEIFENKIITDETNVQNYSDK
FSLDESILDGQVPINPEIVDPLLPNVNMEPLNLPGEEIVFYDDITKYVDYLNSYYYLESQKLSNNVENI
TLTTSVEEALGYSNKIYTFLPSLAEKVNKGVQAGLFLNWANEVVEDFTTNIMKKDTLDKISDVSVIIPY
IGPALNIGNSALRGNFNQAFATAGVAFLLEGFPEFTIPALGVFTFYSSIQEREKIIKTIENCLEQRVKR
WKDSYQWMVSNWLSRITTQFNHINYQMYDSLSYQADAIKAKIDLEYKKYSGSDKENIKSQVENLKN
SLDVKISEAMNNINKFIRECSVTYLFKNMLPKVIDELNKFDLRTKTELINLIDSHNIILVGEVDRLKAKV
NESFENTMPFNIFSYTNNSLLKDIINEYFN
SEQ ID68 Protein CP-HS_GHRH_Ala8_Lys11_Lys20_1-29-LHD fusion
TWPVKDFNYSDPVNDNDILYLRIPQNKLITTPVKAFMITQNIWVIPERFSSDTNPSLSKPPRPTSKYQ
SYYDPSYLSTDEQKDTFLKGIIKLFKRINERDIGKKLINYLVVGSPFMGDSSTPEDTFDFTRHTTNIAV
EKFENGSWKVTNIITPSVLIFGPLPNILDYTASLTLQGQQSNPSFEGFGTLSILKVAPEFLLTFSDVTS
NQSSAVLGKSIFCMDPVIALMHELTHSLHQLYGINIPSDKRIRPQVSEGFFSQDGPNVQFEELYTFG
GLDVEIIPQIERSQLREKALGHYKDIAKRLNNINKTIPSSWISNIDKYKKIFSEKYNFDKDNTGNFVVNI
DKFNSLYSDLTNVMSEVVYSSQYNVKNRTHYFSRHYLPVFANILDDNIYTIRDGFNLTNKGFNIENS
GQNIERNPALQKLSSESVVDLFTKVCVDGIITSKTKSDDDDKYADAIFTASYKKVLGQLSAKKLLQDI
MSRALAGGGGSGGGGSGGGGSALALQCIKVKNNRLPYVADKDSISQEIFENKIITDETNVQNYSDK
FSLDESILDGQVPINPEIVDPLLPNVNMEPLNLPGEEIVFYDDITKYVDYLNSYYYLESQKLSNNVENI
TLTTSVEEALGYSNKIYTFLPSLAEKVNKGVQAGLFLNWANEVVEDFTTNIMKKDTLDKISDVSVIIPY
IGPALNIGNSALRGNFNQAFATAGVAFLLEGFPEFTIPALGVFTFYSSIQEREKIIKTIENCLEQRVKR
WKDSYQWMVSNWLSRITTQFNHINYQMYDSLSYQADAIKAKIDLEYKKYSGSDKENIKSQVENLKN
SLDVKISEAMNNINKFIRECSVTYLFKNMLPKVIDELNKFDLRTKTELINLIDSHNIILVGEVDRLKAKV
NESFENTMPFNIFSYTNNSLLKDIINEYFN
SEQ ID69 Protein sequence CP-HS_GHRH_Ala8_Asn20_1-29-LHD fusion
TWPVKDFNYSDPVNDNDILYLRIPQNKLITTPVKAFMITQNIWVIPERFSSDTNPSLSKPPRPTSKYQ
SYYDPSYLSTDEQKDTFLKGIIKLFKRINERDIGKKLINYLVVGSPFMGDSSTPEDTFDFTRHTTNIAV
EKFENGSWKVTNIITPSVLIFGPLPNILDYTASLTLQGQQSNPSFEGFGTLSILKVAPEFLLTFSDVTS
NQSSAVLGKSIFCMDPVIALMHELTHSLHQLYGINIPSDKRIRPQVSEGFFSQDGPNVQFEELYTFG
GLDVEIIPQIERSQLREKALGHYKDIAKRLNNINKTIPSSWISNIDKYKKIFSEKYNFDKDNTGNFVVNI
DKFNSLYSDLTNVMSEVVYSSQYNVKNRTHYFSRHYLPVFANILDDNIYTIRDGFNLTNKGFNIENS
GQNIERNPALQKLSSESVVDLFTKVCVDGIITSKTKSDDDDKYADAIFTASYRKVLGQLSANKLLQDI
MSRALAGGGGSGGGGSGGGGSALALQCIKVKNNRLPYVADKDSISQEIFENKIITDETNVQNYSDK
FSLDESILDGQVPINPEIVDPLLPNVNMEPLNLPGEEIVFYDDITKYVDYLNSYYYLESQKLSNNVENI
TLTTSVEEALGYSNKIYTFLPSLAEKVNKGVQAGLFLNWANEVVEDFTTNIMKKDTLDKISDVSVIIPY
IGPALNIGNSALRGNFNQAFATAGVAFLLEGFPEFTIPALGVFTFYSSIQEREKIIKTIENCLEQRVKR
WKDSYQWMVSNWLSRITTQFNHINYQMYDSLSYQADAIKAKIDLEYKKYSGSDKENIKSQVENLKN
SLDVKISEAMNNINKFIRECSVTYLFKNMLPKVIDELNKFDLRTKTELINLIDSHNIILVGEVDRLKAKV
NESFENTMPFNIFSYTNNSLLKDIINEYFN
SEQ ID70 Protein sequence CP-HS_GHRH_Ala8_Asn12_1-29-LHD fusion
TWPVKDFNYSDPVNDNDILYLRIPQNKLITTPVKAFMITQNIWVIPERFSSDTNPSLSKPPRPTSKYQ
SYYDPSYLSTDEQKDTFLKGIIKLFKRINERDIGKKLINYLVVGSPFMGDSSTPEDTFDFTRHTTNIAV
EKFENGSWKVTNIITPSVLIFGPLPNILDYTASLTLQGQQSNPSFEGFGTLSILKVAPEFLLTFSDVTS
NQSSAVLGKSIFCMDPVIALMHELTHSLHQLYGINIPSDKRIRPQVSEGFFSQDGPNVQFEELYTFG
GLDVEIIPQIERSQLREKALGHYKDIAKRLNNINKTIPSSWISNIDKYKKIFSEKYNFDKDNTGNFVVNI
DKFNSLYSDLTNVMSEVVYSSQYNVKNRTHYFSRHYLPVFANILDDNIYTIRDGFNLTNKGFNIENS
GQNIERNPALQKLSSESVVDLFTKVCVDGIITSKTKSDDDDKYADAIFTASYRNVLGQLSARKLLQDI
MSRALAGGGGSGGGGSGGGGSALALQCIKVKNNRLPYVADKDSISQEIFENKIITDETNVQNYSDK
FSLDESILDGQVPINPEIVDPLLPNVNMEPLNLPGEEIVFYDDITKYVDYLNSYYYLESQKLSNNVENI
TLTTSVEEALGYSNKIYTFLPSLAEKVNKGVQAGLFLNWANEVVEDFTTNIMKKDTLDKISDVSVIIPY
IGPALNIGNSALRGNFNQAFATAGVAFLLEGFPEFTIPALGVFTFYSSIQEREKIIKTIENCLEQRVKR
WKDSYQWMVSNWLSRITTQFNHINYQMYDSLSYQADAIKAKIDLEYKKYSGSDKENIKSQVENLKN
SLDVKISEAMNNINKFIRECSVTYLFKNMLPKVIDELNKFDLRTKTELINLIDSHNIILVGEVDRLKAKV
NESFENTMPFNIFSYTNNSLLKDIINEYFN
SEQ ID71 Protein sequence CP-HS_GHRH_Ala8_Asn21_1-29-LHD fusion
TWPVKDFNYSDPVNDNDILYLRIPQNKLITTPVKAFMITQNIWVIPERFSSDTNPSLSKPPRPTSKYQ
SYYDPSYLSTDEQKDTFLKGIIKLFKRINERDIGKKLINYLVVGSPFMGDSSTPEDTFDFTRHTTNIAV
EKFENGSWKVTNIITPSVLIFGPLPNILDYTASLTLQGQQSNPSFEGFGTLSILKVAPEFLLTFSDVTS
NQSSAVLGKSIFCMDPVIALMHELTHSLHQLYGINIPSDKRIRPQVSEGFFSQDGPNVQFEELYTFG
GLDVEIIPQIERSQLREKALGHYKDIAKRLNNINKTIPSSWISNIDKYKKIFSEKYNFDKDNTGNFVVNI
DKFNSLYSDLTNVMSEVVYSSQYNVKNRTHYFSRHYLPVFANILDDNIYTIRDGFNLTNKGFNIENS
GQNIERNPALQKLSSESVVDLFTKVCVDGIITSKTKSDDDDKYADAIFTASYRKVLGQLSARNLLQDI
MSRALAGGGGSGGGGSGGGGSALALQCIKVKNNRLPYVADKDSISQEIFENKIITDETNVQNYSDK
FSLDESILDGQVPINPEIVDPLLPNVNMEPLNLPGEEIVFYDDITKYVDYLNSYYYLESQKLSNNVENI
TLTTSVEEALGYSNKIYTFLPSLAEKVNKGVQAGLFLNWANEVVEDFTTNIMKKDTLDKISDVSVIIPY
IGPALNIGNSALRGNFNQAFATAGVAFLLEGFPEFTIPALGVFTFYSSIQEREKIIKTIENCLEQRVKR
WKDSYQWMVSNWLSRITTQFNHINYQMYDSLSYQADAIKAKIDLEYKKYSGSDKENIKSQVENLKN
SLDVKISEAMNNINKFIRECSVTYLFKNMLPKVIDELNKFDLRTKTELINLIDSHNIILVGEVDRLKAKV
NESFENTMPFNIFSYTNNSLLKDIINEYFN
SEQ ID72 Protein sequence CP-HS_GHRH_Ala8_Glu_7_1-29-LHD fusion
TWPVKDFNYSDPVNDNDILYLRIPQNKLITTPVKAFMITQNIWVIPERFSSDTNPSLSKPPRPTSKYQ
SYYDPSYLSTDEQKDTFLKGIIKLFKRINERDIGKKLINYLVVGSPFMGDSSTPEDTFDFTRHTTNIAV
EKFENGSWKVTNIITPSVLIFGPLPNILDYTASLTLQGQQSNPSFEGFGTLSILKVAPEFLLTFSDVTS
NQSSAVLGKSIFCMDPVIALMHELTHSLHQLYGINIPSDKRIRPQVSEGFFSQDGPNVQFEELYTFG
GLDVEIIPQIERSQLREKALGHYKDIAKRLNNINKTIPSSWISNIDKYKKIFSEKYNFDKDNTGNFVVNI
DKFNSLYSDLTNVMSEVVYSSQYNVKNRTHYFSRHYLPVFANILDDNIYTIRDGFNLTNKGFNIENS
GQNIERNPALQKLSSESVVDLFTKVCVDGIITSKTKSDDDDKYADAIFEASYRKVLGQLSARNLLQDI
MSRALAGGGGSGGGGSGGGGSALALQCIKVKNNRLPYVADKDSISQEIFENKIITDETNVQNYSDK
FSLDESILDGQVPINPEIVDPLLPNVNMEPLNLPGEEIVFYDDITKYVDYLNSYYYLESQKLSNNVENI
TLTTSVEEALGYSNKIYTFLPSLAEKVNKGVQAGLFLNWANEVVEDFTTNIMKKDTLDKISDVSVIIPY
IGPALNIGNSALRGNFNQAFATAGVAFLLEGFPEFTIPALGVFTFYSSIQEREKIIKTIENCLEQRVKR
WKDSYQWMVSNWLSRITTQFNHINYQMYDSLSYQADAIKAKIDLEYKKYSGSDKENIKSQVENLKN
SLDVKISEAMNNINKFIRECSVTYLFKNMLPKVIDELNKFDLRTKTELINLIDSHNIILVGEVDRLKAKV
NESFENTMPFNIFSYTNNSLLKDIINEYFN
SEQ ID73 Protein sequence CP-HS_GHRH_Ala8_Glu_10_1-29LHD fusion
TWPVKDFNYSDPVNDNDILYLRIPQNKLITTPVKAFMITQNIWVIPERFSSDTNPSLSKPPRPTSKYQ
SYYDPSYLSTDEQKDTFLKGIIKLFKRINERDIGKKLINYLVVGSPFMGDSSTPEDTFDFTRHTTNIAV
EKFENGSWKVTNIITPSVLIFGPLPNILDYTASLTLQGQQSNPSFEGFGTLSILKVAPEFLLTFSDVTS
NQSSAVLGKSIFCMDPVIALMHELTHSLHQLYGINIPSDKRIRPQVSEGFFSQDGPNVQFEELYTFG
GLDVEIIPQIERSQLREKALGHYKDIAKRLNNINKTIPSSWISNIDKYKKIFSEKYNFDKDNTGNFVVNI
DKFNSLYSDLTNVMSEVVYSSQYNVKNRTHYFSRHYLPVFANILDDNIYTIRDGFNLTNKGFNIENS
GQNIERNPALQKLSSESVVDLFTKVCVDGIITSKTKSDDDDKYADAIFTASERKVLGQLSARKLLQDI
MSRALAGGGGSGGGGSGGGGSALALQCIKVKNNRLPYVADKDSISQEIFENKIITDETNVQNYSDK
FSLDESILDGQVPINPEIVDPLLPNVNMEPLNLPGEEIVFYDDITKYVDYLNSYYYLESQKLSNNVENI
TLTTSVEEALGYSNKIYTFLPSLAEKVNKGVQAGLFLNWANEVVEDFTTNIMKKDTLDKISDVSVIIPY
IGPALNIGNSALRGNFNQAFATAGVAFLLEGFPEFTIPALGVFTFYSSIQEREKIIKTIENCLEQRVKR
WKDSYQWMVSNWLSRITTQFNHINYQMYDSLSYQADAIKAKIDLEYKKYSGSDKENIKSQVENLKN
SLDVKISEAMNNINKFIRECSVTYLFKNMLPKVIDELNKFDLRTKTELINLIDSHNIILVGEVDRLKAKV
NESFENTMPFNIFSYTNNSLLKDIINEYFN
SEQ ID74 Protein sequence CP-HS_GHRH_Ala8_Glu_13_1-29-LHD fusion
TWPVKDFNYSDPVNDNDILYLRIPQNKLITTPVKAFMITQNIWVIPERFSSDTNPSLSKPPRPTSKYQ
SYYDPSYLSTDEQKDTFLKGIIKLFKRINERDIGKKLINYLVVGSPFMGDSSTPEDTFDFTRHTTNIAV
EKFENGSWKVTNIITPSVLIFGPLPNILDYTASLTLQGQQSNPSFEGFGTLSILKVAPEFLLTFSDVTS
NQSSAVLGKSIFCMDPVIALMHELTHSLHQLYGINIPSDKRIRPQVSEGFFSQDGPNVQFEELYTFG
GLDVEIIPQIERSQLREKALGHYKDIAKRLNNINKTIPSSWISNIDKYKKIFSEKYNFDKDNTGNFVVNI
DKFNSLYSDLTNVMSEVVYSSQYNVKNRTHYFSRHYLPVFANILDDNIYTIRDGFNLTNKGFNIENS
GQNIERNPALQKLSSESVVDLFTKVCVDGIITSKTKSDDDDKYADAIFTASYRKELGQLSARKLLQDI
MSRALAGGGGSGGGGSGGGGSALALQCIKVKNNRLPYVADKDSISQEIFENKIITDETNVQNYSDK
FSLDESILDGQVPINPEIVDPLLPNVNMEPLNLPGEEIVFYDDITKYVDYLNSYYYLESQKLSNNVENI
TLTTSVEEALGYSNKIYTFLPSLAEKVNKGVQAGLFLNWANEVVEDFTTNIMKKDTLDKISDVSVIIPY
IGPALNIGNSALRGNFNQAFATAGVAFLLEGFPEFTIPALGVFTFYSSIQEREKIIKTIENCLEQRVKR
WKDSYQWMVSNWLSRITTQFNHINYQMYDSLSYQADAIKAKIDLEYKKYSGSDKENIKSQVENLKN
SLDVKISEAMNNINKFIRECSVTYLFKNMLPKVIDELNKFDLRTKTELINLIDSHNIILVGEVDRLKAKV
NESFENTMPFNIFSYTNNSLLKDIINEYFN
SEQ ID75 Protein sequence of the CP-HS_GHRH_Ala8-LHD fusion
TWPVKDFNYSDPVNDNDILYLRIPQNKLITTPVKAFMITQNIWVIPERFSSDTNPSLSKPPRPTSKYQ
SYYDPSYLSTDEQKDTFLKGIIKLFKRINERDIGKKLINYLVVGSPFMGDSSTPEDTFDFTRHTTNIAV
EKFENGSWKVTNIITPSVLIFGPLPNILDYTASLTLQGQQSNPSFEGFGTLSILKVAPEFLLTFSDVTS
NQSSAVLGKSIFCMDPVIALMHELTHSLHQLYGINIPSDKRIRPQVSEGFFSQDGPNVQFEELYTFG
GLDVEIIPQIERSQLREKALGHYKDIAKRLNNINKTIPSSWISNIDKYKKIFSEKYNFDKDNTGNFVVNI
DKFNSLYSDLTNVMSEVVYSSQYNVKNRTHYFSRHYLPVFANILDDNIYTIRDGFNLTNKGFNIENS
GQNIERNPALQKLSSESVVDLFTKVCVDGIITSKTKSDDDDKYADAIFTASYRKVLGQLSARKLLQDI
MSRALAGGGGSGGGGSGGGGSALALQCIKVKNNRLPYVADKDSISQEIFENKIITDETNVQNYSDK
FSLDESILDGQVPINPEIVDPLLPNVNMEPLNLPGEEIVFYDDITKYVDYLNSYYYLESQKLSNNVENI
TLTTSVEEALGYSNKIYTFLPSLAEKVNKGVQAGLFLNWANEVVEDFTTNIMKKDTLDKISDVSVIIPY
IGPALNIGNSALRGNFNQAFATAGVAFLLEGFPEFTIPALGVFTFYSSIQEREKIIKTIENCLEQRVKR
WKDSYQWMVSNWLSRITTQFNHINYQMYDSLSYQADAIKAKIDLEYKKYSGSDKENIKSQVENLKN
SLDVKISEAMNNINKFIRECSVTYLFKNMLPKVIDELNKFDLRTKTELINLIDSHNIILVGEVDRLKAKV
NESFENTMPFNIFSYTNNSLLKDIINEYFN
SEQ ID76 Protein sequence of the CP-HS_GHRH_Glu8_1-29-LHD fusion
TWPVKDFNYSDPVNDNDILYLRIPQNKLITTPVKAFMITQNIWVIPERFSSDTNPSLSKPPRPTSKYQ
SYYDPSYLSTDEQKDTFLKGIIKLFKRINERDIGKKLINYLVVGSPFMGDSSTPEDTFDFTRHTTNIAV
EKFENGSWKVTNIITPSVLIFGPLPNILDYTASLTLQGQQSNPSFEGFGTLSILKVAPEFLLTFSDVTS
NQSSAVLGKSIFCMDPVIALMHELTHSLHQLYGINIPSDKRIRPQVSEGFFSQDGPNVQFEELYTFG
GLDVEIIPQIERSQLREKALGHYKDIAKRLNNINKTIPSSWISNIDKYKKIFSEKYNFDKDNTGNFVVNI
DKFNSLYSDLTNVMSEVVYSSQYNVKNRTHYFSRHYLPVFANILDDNIYTIRDGFNLTNKGFNIENS
GQNIERNPALQKLSSESVVDLFTKVCVDGIITSKTKSDDDDKYADAIFTESYRKVLGQLSARKLLQDI
MSRALAGGGGSGGGGSGGGGSALALQCIKVKNNRLPYVADKDSISQEIFENKIITDETNVQNYSDK
FSLDESILDGQVPINPEIVDPLLPNVNMEPLNLPGEEIVFYDDITKYVDYLNSYYYLESQKLSNNVENI
TLTTSVEEALGYSNKIYTFLPSLAEKVNKGVQAGLFLNWANEVVEDFTTNIMKKDTLDKISDVSVIIPY
IGPALNIGNSALRGNFNQAFATAGVAFLLEGFPEFTIPALGVFTFYSSIQEREKIIKTIENCLEQRVKR
WKDSYQWMVSNWLSRITTQFNHINYQMYDSLSYQADAIKAKIDLEYKKYSGSDKENIKSQVENLKN
SLDVKISEAMNNINKFIRECSVTYLFKNMLPKVIDELNKFDLRTKTELINLIDSHNIILVGEVDRLKAKV
NESFENTMPFNIFSYTNNSLLKDIINEYFN
SEQ ID77 Protein sequence of the CP-HS_GHRH_Ala15_1-27-LHD fusion
TWPVKDFNYSDPVNDNDILYLRIPQNKLITTPVKAFMITQNIWVIPERFSSDTNPSLSKPPRPTSKYQ
SYYDPSYLSTDEQKDTFLKGIIKLFKRINERDIGKKLINYLVVGSPFMGDSSTPEDTFDFTRHTTNIAV
EKFENGSWKVTNIITPSVLIFGPLPNILDYTASLTLQGQQSNPSFEGFGTLSILKVAPEFLLTFSDVTS
NQSSAVLGKSIFCMDPVIALMHELTHSLHQLYGINIPSDKRIRPQVSEGFFSQDGPNVQFEELYTFG
GLDVEIIPQIERSQLREKALGHYKDIAKRLNNINKTIPSSWISNIDKYKKIFSEKYNFDKDNTGNFVVNI
DKFNSLYSDLTNVMSEVVYSSQYNVKNRTHYFSRHYLPVFANILDDNIYTIRDGFNLTNKGFNIENS
GQNIERNPALQKLSSESVVDLFTKVCVDGIITSKTKSDDDDKYADAIFTNSYRKVLAQLSARKLLQDI
MALAGGGGSGGGGSGGGGSALALQCIKVKNNRLPYVADKDSISQEIFENKIITDETNVQNYSDKFS
LDESILDGQVPINPEIVDPLLPNVNMEPLNLPGEEIVFYDDITKYVDYLNSYYYLESQKLSNNVENITL
TTSVEEALGYSNKIYTFLPSLAEKVNKGVQAGLFLNWANEVVEDFTTNIMKKDTLDKISDVSVIIPYIG
PALNIGNSALRGNFNQAFATAGVAFLLEGFPEFTIPALGVFTFYSSIQEREKIIKTIENCLEQRVKRWK
DSYQWMVSNWLSRITTQFNHINYQMYDSLSYQADAIKAKIDLEYKKYSGSDKENIKSQVENLKNSL
DVKISEAMNNINKFIRECSVTYLFKNMLPKVIDELNKFDLRTKTELINLIDSHNIILVGEVDRLKAKVNE
SFENTMPFNIFSYTNNSLLKDIINEYFN
SEQ ID78 Protein sequence of the CP-HS_GHRH_Ala15-LHD fusion
TWPVKDFNYSDPVNDNDILYLRIPQNKLITTPVKAFMITQNIWVIPERFSSDTNPSLSKPPRPTSKYQ
SYYDPSYLSTDEQKDTFLKGIIKLFKRINERDIGKKLINYLVVGSPFMGDSSTPEDTFDFTRHTTNIAV
EKFENGSWKVTNIITPSVLIFGPLPNILDYTASLTLQGQQSNPSFEGFGTLSILKVAPEFLLTFSDVTS
NQSSAVLGKSIFCMDPVIALMHELTHSLHQLYGINIPSDKRIRPQVSEGFFSQDGPNVQFEELYTFG
GLDVEIIPQIERSQLREKALGHYKDIAKRLNNINKTIPSSWISNIDKYKKIFSEKYNFDKDNTGNFVVNI
DKFNSLYSDLTNVMSEVVYSSQYNVKNRTHYFSRHYLPVFANILDDNIYTIRDGFNLTNKGFNIENS
GQNIERNPALQKLSSESVVDLFTKVCVDGIITSKTKSDDDDKYADAIFTNSYRKVLAQLSARKLLQDI
MSRALAGGGGSGGGGSGGGGSALALQCIKVKNNRLPYVADKDSISQEIFENKIITDETNVQNYSDK
FSLDESILDGQVPINPEIVDPLLPNVNMEPLNLPGEEIVFYDDITKYVDYLNSYYYLESQKLSNNVENI
TLTTSVEEALGYSNKIYTFLPSLAEKVNKGVQAGLFLNWANEVVEDFTTNIMKKDTLDKISDVSVIIPY
IGPALNIGNSALRGNFNQAFATAGVAFLLEGFPEFTIPALGVFTFYSSIQEREKIIKTIENCLEQRVKR
WKDSYQWMVSNWLSRITTQFNHINYQMYDSLSYQADAIKAKIDLEYKKYSGSDKENIKSQVENLKN
SLDVKISEAMNNINKFIRECSVTYLFKNMLPKVIDELNKFDLRTKTELINLIDSHNIILVGEVDRLKAKV
NESFENTMPFNIFSYTNNSLLKDIINEYFN
SEQ ID79 Protein sequence CP-HS_GHRH_Ala8_Ala15_1-29-LHD fusion
TWPVKDFNYSDPVNDNDILYLRIPQNKLITTPVKAFMITQNIWVIPERFSSDTNPSLSKPPRPTSKYQ
SYYDPSYLSTDEQKDTFLKGIIKLFKRINERDIGKKLINYLVVGSPFMGDSSTPEDTFDFTRHTTNIAV
EKFENGSWKVTNIITPSVLIFGPLPNILDYTASLTLQGQQSNPSFEGFGTLSILKVAPEFLLTFSDVTS
NQSSAVLGKSIFCMDPVIALMHELTHSLHQLYGINIPSDKRIRPQVSEGFFSQDGPNVQFEELYTFG
GLDVEIIPQIERSQLREKALGHYKDIAKRLNNINKTIPSSWISNIDKYKKIFSEKYNFDKDNTGNFVVNI
DKFNSLYSDLTNVMSEVVYSSQYNVKNRTHYFSRHYLPVFANILDDNIYTIRDGFNLTNKGFNIENS
GQNIERNPALQKLSSESVVDLFTKVCVDGIITSKTKSDDDDKYADAIFTASYRKVLAQLSARKLLQDI
MSRALAGGGGSGGGGSGGGGSALALQCIKVKNNRLPYVADKDSISQEIFENKIITDETNVQNYSDK
FSLDESILDGQVPINPEIVDPLLPNVNMEPLNLPGEEIVFYDDITKYVDYLNSYYYLESQKLSNNVENI
TLTTSVEEALGYSNKIYTFLPSLAEKVNKGVQAGLFLNWANEVVEDFTTNIMKKDTLDKISDVSVIIPY
IGPALNIGNSALRGNFNQAFATAGVAFLLEGFPEFTIPALGVFTFYSSIQEREKIIKTIENCLEQRVKR
WKDSYQWMVSNWLSRITTQFNHINYQMYDSLSYQADAIKAKIDLEYKKYSGSDKENIKSQVENLKN
SLDVKISEAMNNINKFIRECSVTYLFKNMLPKVIDELNKFDLRTKTELINLIDSHNIILVGEVDRLKAKV
NESFENTMPFNIFSYTNNSLLKDIINEYFN
SEQ ID80 Protein sequence CP-HS_GHRH_Ala8_9_15_22_27-LHD fusion
TWPVKDFNYSDPVNDNDILYLRIPQNKLITTPVKAFMITQNIWVIPERFSSDTNPSLSKPPRPTSKYQ
SYYDPSYLSTDEQKDTFLKGIIKLFKRINERDIGKKLINYLVVGSPFMGDSSTPEDTFDFTRHTTNIAV
EKFENGSWKVTNIITPSVLIFGPLPNILDYTASLTLQGQQSNPSFEGFGTLSILKVAPEFLLTFSDVTS
NQSSAVLGKSIFCMDPVIALMHELTHSLHQLYGINIPSDKRIRPQVSEGFFSQDGPNVQFEELYTFG
GLDVEIIPQIERSQLREKALGHYKDIAKRLNNINKTIPSSWISNIDKYKKIFSEKYNFDKDNTGNFVVNI
DKFNSLYSDLTNVMSEVVYSSQYNVKNRTHYFSRHYLPVFANILDDNIYTIRDGFNLTNKGFNIENS
GQNIERNPALQKLSSESVVDLFTKVCVDGIITSKTKSDDDDKYADAIFTAAYRKVLAQLSARKALQDI
ASRALAGGGGSGGGGSGGGGSALALQCIKVKNNRLPYVADKDSISQEIFENKIITDETNVQNYSDK
FSLDESILDGQVPINPEIVDPLLPNVNMEPLNLPGEEIVFYDDITKYVDYLNSYYYLESQKLSNNVENI
TLTTSVEEALGYSNKIYTFLPSLAEKVNKGVQAGLFLNWANEVVEDFTTNIMKKDTLDKISDVSVIIPY
IGPALNIGNSALRGNFNQAFATAGVAFLLEGFPEFTIPALGVFTFYSSIQEREKIIKTIENCLEQRVKR
WKDSYQWMVSNWLSRITTQFNHINYQMYDSLSYQADAIKAKIDLEYKKYSGSDKENIKSQVENLKN
SLDVKISEAMNNINKFIRECSVTYLFKNMLPKVIDELNKFDLRTKTELINLIDSHNIILVGEVDRLKAKV
NESFENTMPFNIFSYTNNSLLKDIINEYFN
SEQ ID81 Protein sequence of the CP-HS_GHRH_Ala8_9_15_22-LHD fusion
TWPVKDFNYSDPVNDNDILYLRIPQNKLITTPVKAFMITQNIWVIPERFSSDTNPSLSKPPRPTSKYQ
SYYDPSYLSTDEQKDTFLKGIIKLFKRINERDIGKKLINYLVVGSPFMGDSSTPEDTFDFTRHTTNIAV
EKFENGSWKVTNIITPSVLIFGPLPNILDYTASLTLQGQQSNPSFEGFGTLSILKVAPEFLLTFSDVTS
NQSSAVLGKSIFCMDPVIALMHELTHSLHQLYGINIPSDKRIRPQVSEGFFSQDGPNVQFEELYTFG
GLDVEIIPQIERSQLREKALGHYKDIAKRLNNINKTIPSSWISNIDKYKKIFSEKYNFDKDNTGNFVVNI
DKFNSLYSDLTNVMSEVVYSSQYNVKNRTHYFSRHYLPVFANILDDNIYTIRDGFNLTNKGFNIENS
GQNIERNPALQKLSSESVVDLFTKVCVDGIITSKTKSDDDDKYADAIFTAAYRKVLAQLSARKALQDI
MSRALAGGGGSGGGGSGGGGSALALQCIKVKNNRLPYVADKDSISQEIFENKIITDETNVQNYSDK
FSLDESILDGQVPINPEIVDPLLPNVNMEPLNLPGEEIVFYDDITKYVDYLNSYYYLESQKLSNNVENI
TLTTSVEEALGYSNKIYTFLPSLAEKVNKGVQAGLFLNWANEVVEDFTTNIMKKDTLDKISDVSVIIPY
IGPALNIGNSALRGNFNQAFATAGVAFLLEGFPEFTIPALGVFTFYSSIQEREKIIKTIENCLEQRVKR
WKDSYQWMVSNWLSRITTQFNHINYQMYDSLSYQADAIKAKIDLEYKKYSGSDKENIKSQVENLKN
SLDVKISEAMNNINKFIRECSVTYLFKNMLPKVIDELNKFDLRTKTELINLIDSHNIILVGEVDRLKAKV
NESFENTMPFNIFSYTNNSLLKDIINEYFN
SEQ ID82 Protein sequence of the CP-HS_GHRH_HVQAL_1-32-LHD fusion
TWPVKDFNYSDPVNDNDILYLRIPQNKLITTPVKAFMITQNIWVIPERFSSDTNPSLSKPPRPTSKYQ
SYYDPSYLSTDEQKDTFLKGIIKLFKRINERDIGKKLINYLVVGSPFMGDSSTPEDTFDFTRHTTNIAV
EKFENGSWKVTNIITPSVLIFGPLPNILDYTASLTLQGQQSNPSFEGFGTLSILKVAPEFLLTFSDVTS
NQSSAVLGKSIFCMDPVIALMHELTHSLHQLYGINIPSDKRIRPQVSEGFFSQDGPNVQFEELYTFG
GLDVEIIPQIERSQLREKALGHYKDIAKRLNNINKTIPSSWISNIDKYKKIFSEKYNFDKDNTGNFVVNI
DKFNSLYSDLTNVMSEVVYSSQYNVKNRTHYFSRHYLPVFANILDDNIYTIRDGFNLTNKGFNIENS
GQNIERNPALQKLSSESVVDLFTKVCVDGIITSKTKSDDDDKHVDAIFTQSYRKVLAQLSARKALQDI
LSRQQGALAGGGGSGGGGSGGGGSALALQCIKVKNNRLPYVADKDSISQEIFENKIITDETNVQNY
SDKFSLDESILDGQVPINPEIVDPLLPNVNMEPLNLPGEEIVFYDDITKYVDYLNSYYYLESQKLSNN
VENITLTTSVEEALGYSNKIYTFLPSLAEKVNKGVQAGLFLNWANEVVEDFTTNIMKKDTLDKISDVS
VIIPYIGPALNIGNSALRGNFNQAFATAGVAFLLEGFPEFTIPALGVFTFYSSIQEREKIIKTIENCLEQR
VKRWKDSYQWMVSNWLSRITTQFNHINYQMYDSLSYQADAIKAKIDLEYKKYSGSDKENIKSQVEN
LKNSLDVKISEAMNNINKFIRECSVTYLFKNMLPKVIDELNKFDLRTKTELINLIDSHNIILVGEVDRLKA
KVNESFENTMPFNIFSYTNNSLLKDIINEYFN
SEQ ID83 Protein sequence of the CP-HS_GHRH_HVSAL_1-29-LHD fusion
TWPVKDFNYSDPVNDNDILYLRIPQNKLITTPVKAFMITQNIWVIPERFSSDTNPSLSKPPRPTSKYQ
SYYDPSYLSTDEQKDTFLKGIIKLFKRINERDIGKKLINYLVVGSPFMGDSSTPEDTFDFTRHTTNIAV
EKFENGSWKVTNIITPSVLIFGPLPNILDYTASLTLQGQQSNPSFEGFGTLSILKVAPEFLLTFSDVTS
NQSSAVLGKSIFCMDPVIALMHELTHSLHQLYGINIPSDKRIRPQVSEGFFSQDGPNVQFEELYTFG
GLDVEIIPQIERSQLREKALGHYKDIAKRLNNINKTIPSSWISNIDKYKKIFSEKYNFDKDNTGNFVVNI
DKFNSLYSDLTNVMSEVVYSSQYNVKNRTHYFSRHYLPVFANILDDNIYTIRDGFNLTNKGFNIENS
GQNIERNPALQKLSSESVVDLFTKVCVDGIITSKTKSDDDDKHVDAIFTSSYRKVLAQLSARKLLQDI
LSRALAGGGGSGGGGSGGGGSALALQCIKVKNNRLPYVADKDSISQEIFENKIITDETNVQNYSDK
FSLDESILDGQVPINPEIVDPLLPNVNMEPLNLPGEEIVFYDDITKYVDYLNSYYYLESQKLSNNVENI
TLTTSVEEALGYSNKIYTFLPSLAEKVNKGVQAGLFLNWANEVVEDFTTNIMKKDTLDKISDVSVIIPY
IGPALNIGNSALRGNFNQAFATAGVAFLLEGFPEFTIPALGVFTFYSSIQEREKIIKTIENCLEQRVKR
WKDSYQWMVSNWLSRITTQFNHINYQMYDSLSYQADAIKAKIDLEYKKYSGSDKENIKSQVENLKN
SLDVKISEAMNNINKFIRECSVTYLFKNMLPKVIDELNKFDLRTKTELINLIDSHNIILVGEVDRLKAKV
NESFENTMPFNIFSYTNNSLLKDIINEYFN
SEQ ID84 Protein sequence of the CP-HS_GHRH_HVTAL_1-29-LHD fusion
TWPVKDFNYSDPVNDNDILYLRIPQNKLITTPVKAFMITQNIWVIPERFSSDTNPSLSKPPRPTSKYQ
SYYDPSYLSTDEQKDTFLKGIIKLFKRINERDIGKKLINYLVVGSPFMGDSSTPEDTFDFTRHTTNIAV
EKFENGSWKVTNIITPSVLIFGPLPNILDYTASLTLQGQQSNPSFEGFGTLSILKVAPEFLLTFSDVTS
NQSSAVLGKSIFCMDPVIALMHELTHSLHQLYGINIPSDKRIRPQVSEGFFSQDGPNVQFEELYTFG
GLDVEIIPQIERSQLREKALGHYKDIAKRLNNINKTIPSSWISNIDKYKKIFSEKYNFDKDNTGNFVVNI
DKFNSLYSDLTNVMSEVVYSSQYNVKNRTHYFSRHYLPVFANILDDNIYTIRDGFNLTNKGFNIENS
GQNIERNPALQKLSSESVVDLFTKVCVDGIITSKTKSDDDDKHVDAIFTTSYRKVLAQLSARKLLQDI
LSRALAGGGGSGGGGSGGGGSALALQCIKVKNNRLPYVADKDSISQEIFENKIITDETNVQNYSDK
FSLDESILDGQVPINPEIVDPLLPNVNMEPLNLPGEEIVFYDDITKYVDYLNSYYYLESQKLSNNVENI
TLTTSVEEALGYSNKIYTFLPSLAEKVNKGVQAGLFLNWANEVVEDFTTNIMKKDTLDKISDVSVIIPY
IGPALNIGNSALRGNFNQAFATAGVAFLLEGFPEFTIPALGVFTFYSSIQEREKIIKTIENCLEQRVKR
WKDSYQWMVSNWLSRITTQFNHINYQMYDSLSYQADAIKAKIDLEYKKYSGSDKENIKSQVENLKN
SLDVKISEAMNNINKFIRECSVTYLFKNMLPKVIDELNKFDLRTKTELINLIDSHNIILVGEVDRLKAKV
NESFENTMPFNIFSYTNNSLLKDIINEYFN
SEQ ID85 Protein sequence of the CP-HS_GHRH_QALN-LHD fusion
TWPVKDFNYSDPVNDNDILYLRIPQNKLITTPVKAFMITQNIWVIPERFSSDTNPSLSKPPRPTSKYQ
SYYDPSYLSTDEQKDTFLKGIIKLFKRINERDIGKKLINYLVVGSPFMGDSSTPEDTFDFTRHTTNIAV
EKFENGSWKVTNIITPSVLIFGPLPNILDYTASLTLQGQQSNPSFEGFGTLSILKVAPEFLLTFSDVTS
NQSSAVLGKSIFCMDPVIALMHELTHSLHQLYGINIPSDKRIRPQVSEGFFSQDGPNVQFEELYTFG
GLDVEIIPQIERSQLREKALGHYKDIAKRLNNINKTIPSSWISNIDKYKKIFSEKYNFDKDNTGNFVVNI
DKFNSLYSDLTNVMSEVVYSSQYNVKNRTHYFSRHYLPVFANILDDNIYTIRDGFNLTNKGFNIENS
GQNIERNPALQKLSSESVVDLFTKVCVDGIITSKTKSDDDDKYADAIFTQSYRKVLAQLSARKALQDI
LNRALAGGGGSGGGGSGGGGSALALQCIKVKNNRLPYVADKDSISQEIFENKIITDETNVQNYSDK
FSLDESILDGQVPINPEIVDPLLPNVNMEPLNLPGEEIVFYDDITKYVDYLNSYYYLESQKLSNNVENI
TLTTSVEEALGYSNKIYTFLPSLAEKVNKGVQAGLFLNWANEVVEDFTTNIMKKDTLDKISDVSVIIPY
IGPALNIGNSALRGNFNQAFATAGVAFLLEGFPEFTIPALGVFTFYSSIQEREKIIKTIENCLEQRVKR
WKDSYQWMVSNWLSRITTQFNHINYQMYDSLSYQADAIKAKIDLEYKKYSGSDKENIKSQVENLKN
SLDVKISEAMNNINKFIRECSVTYLFKNMLPKVIDELNKFDLRTKTELINLIDSHNIILVGEVDRLKAKV
NESFENTMPFNIFSYTNNSLLKDIINEYFN
SEQ ID86 Protein sequence of the CP-HS_GHRH_QAL-LHD fusion
TWPVKDFNYSDPVNDNDILYLRIPQNKLITTPVKAFMITQNIWVIPERFSSDTNPSLSKPPRPTSKYQ
SYYDPSYLSTDEQKDTFLKGIIKLFKRINERDIGKKLINYLVVGSPFMGDSSTPEDTFDFTRHTTNIAV
EKFENGSWKVTNIITPSVLIFGPLPNILDYTASLTLQGQQSNPSFEGFGTLSILKVAPEFLLTFSDVTS
NQSSAVLGKSIFCMDPVIALMHELTHSLHQLYGINIPSDKRIRPQVSEGFFSQDGPNVQFEELYTFG
GLDVEIIPQIERSQLREKALGHYKDIAKRLNNINKTIPSSWISNIDKYKKIFSEKYNFDKDNTGNFVVNI
DKFNSLYSDLTNVMSEVVYSSQYNVKNRTHYFSRHYLPVFANILDDNIYTIRDGFNLTNKGFNIENS
GQNIERNPALQKLSSESVVDLFTKVCVDGIITSKTKSDDDDKYADAIFTQSYRKVLAQLSARKALQDI
LSRALAGGGGSGGGGSGGGGSALALQCIKVKNNRLPYVADKDSISQEIFENKIITDETNVQNYSDK
FSLDESILDGQVPINPEIVDPLLPNVNMEPLNLPGEEIVFYDDITKYVDYLNSYYYLESQKLSNNVENI
TLTTSVEEALGYSNKIYTFLPSLAEKVNKGVQAGLFLNWANEVVEDFTTNIMKKDTLDKISDVSVIIPY
IGPALNIGNSALRGNFNQAFATAGVAFLLEGFPEFTIPALGVFTFYSSIQEREKIIKTIENCLEQRVKR
WKDSYQWMVSNWLSRITTQFNHINYQMYDSLSYQADAIKAKIDLEYKKYSGSDKENIKSQVENLKN
SLDVKISEAMNNINKFIRECSVTYLFKNMLPKVIDELNKFDLRTKTELINLIDSHNIILVGEVDRLKAKV
NESFENTMPFNIFSYTNNSLLKDIINEYFN
SEQ ID87 Protein sequence of the CP-hGHRH29 N8A M27L-LHD fusion
TWPVKDFNYSDPVNDNDILYLRIPQNKLITTPVKAFMITQNIWVIPERFSSDTNPSLSKPPRPTSKYQ
SYYDPSYLSTDEQKDTFLKGIIKLFKRINERDIGKKLINYLVVGSPFMGDSSTPEDTFDFTRHTTNIAV
EKFENGSWKVTNIITPSVLIFGPLPNILDYTASLTLQGQQSNPSFEGFGTLSILKVAPEFLLTFSDVTS
NQSSAVLGKSIFCMDPVIALMHELTHSLHQLYGINIPSDKRIRPQVSEGFFSQDGPNVQFEELYTFG
GLDVEIIPQIERSQLREKALGHYKDIAKRLNNINKTIPSSWISNIDKYKKIFSEKYNFDKDNTGNFVVNI
DKFNSLYSDLTNVMSEVVYSSQYNVKNRTHYFSRHYLPVFANILDDNIYTIRDGFNLTNKGFNIENS
GQNIERNPALQKLSSESVVDLFTKVCVDGIITSKTKSIEGRYADAIFTASYRKVLGQLSARKLLQDILS
RALAGGGGSGGGGSGGGGSALALQCIKVKNNRLPYVADKDSISQEIFENKIITDETNVQNYSDKFS
LDESILDGQVPINPEIVDPLLPNVNMEPLNLPGEEIVFYDDITKYVDYLNSYYYLESQKLSNNVENITL
TTSVEEALGYSNKIYTFLPSLAEKVNKGVQAGLFLNWANEVVEDFTTNIMKKDTLDKISDVSVIIPYIG
PALNIGNSALRGNFNQAFATAGVAFLLEGFPEFTIPALGVFTFYSSIQEREKIIKTIENCLEQRVKRWK
DSYQWMVSNWLSRITTQFNHINYQMYDSLSYQADAIKAKIDLEYKKYSGSDKENIKSQVENLKNSL
DVKISEAMNNINKFIRECSVTYLFKNMLPKVIDELNKFDLRTKTELINLIDSHNIILVGEVDRLKAKVNE
SFENTMPFNIFSYTNNSLLKDIINEYFN

The application's sequence listing, which the Patent Office published only in electronic form, follows.

SEQUENCE LISTING (181 sequences)

SEQ ID NO: 1 - DNA, 2619 bp, Artificial Sequence
  source: /note="Description of Artificial Sequence: Synthetic polynucleotide"
ggatccatggagttcgttaacaaacagttcaactataaagacccagttaacggtgttgacattgcttacatcaaaatcccgaacgctggccagatgcagccggtaaaggcattcaaaatccacaacaaaatctgggttatcccggaacgtgatacctttactaacccggaagaaggtgacctgaacccgccaccggaagcgaaacaggtgccggtatcttactatgactccacctacctgtctaccgataacgaaaaggacaactacctgaaaggtgttactaaactgttcgagcgtatttactccaccgacctgggccgtatgctgctgactagcatcgttcgcggtatcccgttctggggcggttctaccatcgataccgaactgaaagtaatcgacactaactgcatcaacgttattcagccggacggttcctatcgttccgaagaactgaacctggtgatcatcggcccgtctgctgatatcatccagttcgagtgtaagagctttggtcacgaagttctgaacctcacccgtaacggctacggttccactcagtacatccgtttctctccggacttcaccttcggttttgaagaatccctggaagtagacacgaacccactgctgggcgctggtaaattcgcaactgatcctgcggttaccctggctcacgaactgattcatgcaggccaccgcctgtacggtatcgccatcaatccgaaccgtgtcttcaaagttaacaccaacgcgtattacgagatgtccggtctggaagttagcttcgaagaactgcgtacttttggcggtcacgacgctaaattcatcgactctctgcaagaaaacgagttccgtctgtactactataacaagttcaaagatatcgcatccaccctgaacaaagcgaaatccatcgtgggtaccactgcttctctccagtacatgaagaacgtttttaaagaaaaatacctgctcagcgaagacacctccggcaaattctctgtagacaagttgaaattcgataaactttacaaaatgctgactgaaatttacaccgaagacaacttcgttaagttctttaaagttctgaaccgcaaaacctatctgaacttcgacaaggcagtattcaaaatcaacatcgtgccgaaagttaactacactatctacgatggtttcaacctgcgtaacaccaacctggctgctaattttaacggccagaacacggaaatcaacaacatgaacttcacaaaactgaaaaacttcactggtctgttcgagttttacaagctgctgtgcgtcgacggcatcattacctccaaaactaaatctgacgatgacgataaaaacaaagcgctgaacctgcagtgtatcaaggttaacaactgggatttattcttcagcccgagtgaagacaacttcaccaacgacctgaacaaaggtgaagaaatcacctcagatactaacatcgaagcagccgaagaaaacatctcgctggacctgatccagcagtactacctgacctttaatttcgacaacgagccggaaaacatttctatcgaaaacctgagctctgatatcatcggccagctggaactgatgccgaacatcgaacgtttcccaaacggtaaaaagtacgagctggacaaatataccatgttccactacctgcgcgcgcaggaatttgaacacggcaaatcccgtatcgcactgactaactccgttaacgaagctctgctcaacccgtcccgtgtatacaccttcttctctagcgactacgtgaaaaaggtcaacaaagcgactgaagctgcaatgttcttgggttgggttgaacagcttgtttatgattttaccgacgagacgtccgaagtatctactaccgacaaaattgcggatatcactatcatcatcccgtacatcggtccggctctgaacattggcaacatgctgtacaaagacgacttcgttggcgcactgatcttctccggtgcggtgatcctgctggagttcatcccggaaatcgccatcccggtactgggcacctttgctctggtttcttacattgcaaacaaggttctgactgtacaaaccatcgacaacgcgctgagcaaacgtaacgaaaaatgggatgaagtttacaaatatatcgtgaccaactggctggctaaggttaatactcagatcgacctcatccgcaaaaaaatgaaagaagcactggaaaaccaggcggaagctaccaaggcaatcattaactaccagtacaaccagtacaccgaggaagaaaaaaacaacatcaacttcaacatcgacgatctgtcctctaaactgaacgaatccatcaacaaagctatgatcaacatcaacaagttcctgaaccagtgctctgtaagctatctgatgaactccatgatcccgtacggtgttaaacgtctggaggacttcgatgcgtctctgaaagacgccctgctgaaatacatttacgacaaccgtggcactctgatcggtcaggttgatcgtctgaaggacaaagtgaacaataccttatcgaccgacatcccttttcagctcagtaaatatgtcgataaccaacgccttttgtccactctagaataatgaaagctt

SEQ ID NO: 2 - DNA, 2634 bp, Artificial Sequence
  source: /note="Description of Artificial Sequence: Synthetic polynucleotide"
ggatccatgccggttaccatcaacaacttcaactacaacgacccgatcgacaacaacaacatcattatgatggaaccgccgttcgcacgtggtaccggacgttactacaaggcttttaagatcaccgaccgtatctggatcatcccggaacgttacaccttcggttacaaacctgaggacttcaacaagagtagcgggattttcaatcgtgacgtctgcgagtactatgatccagattatctgaataccaacgataagaagaacatattccttcagactatgattaaactcttcaaccgtatcaaaagcaaaccgctcggtgaaaaactcctcgaaatgattatcaacggtatcccgtacctcggtgaccgtcgtgtcccgcttgaagagttcaacaccaacatcgcaagcgtcaccgtcaacaaactcatcagcaacccaggtgaagtcgaacgtaaaaaaggtatcttcgcaaacctcatcatcttcggtccgggtccggtcctcaacgaaaacgaaaccatcgacatcggtatccagaaccacttcgcaagccgtgaaggtttcggtggtatcatgcagatgaaattctgcccggaatacgtcagtgtcttcaacaacgtccaggaaaacaaaggtgcaagcatcttcaaccgtcgtggttacttcagcgacccggcactcatcctcatgcatgaactcatccacgtcctccacggtctctacggtatcaaagttgacgacctcccgatcgtcccgaacgagaagaaattcttcatgcagagcaccgacgcaatccaggctgaggaactctacaccttcggtggccaagacccaagtatcataaccccgtccaccgacaaaagcatctacgacaaagtcctccagaacttcaggggtatcgtggacagactcaacaaagtcctcgtctgcatcagcgacccgaacatcaatatcaacatatacaagaacaagttcaaagacaagtacaaattcgtcgaggacagcgaaggcaaatacagcatcgacgtagaaagtttcgacaagctctacaaaagcctcatgttcggtttcaccgaaaccaacatcgccgagaactacaagatcaagacaagggcaagttacttcagcgacagcctcccgcctgtcaaaatcaagaacctcttagacaacgagatttacacaattgaagagggcttcaacatcagtgacaaagacatggagaaggaatacagaggtcagaacaaggctatcaacaaacaggcatacgaggagatcagcaaagaacacctcgcagtctacaagatccagatgtgcgtcgacgaagaaaagctgtacgacgacgacgacaaagaccgttggggttcttcgctgcagtgcatcgacgttgacaacgaagacctgttcttcatcgctgacaaaaacagcttcagtgacgacctgagcaaaaacgaacgtatcgaatacaacacccagagcaactacatcgaaaacgacttcccgatcaacgaactgatcctggacaccgacctgataagtaaaatcgaactgccgagcgaaaacaccgaaagtctgaccgacttcaacgttgacgttccggtttacgaaaaacagccggctatcaagaaaatcttcaccgacgaaaacaccatcttccagtacctgtacagccagaccttcccgctggacatccgtgacatcagtctgaccagcagtttcgacgacgctctgctgttcagcaacaaagtttacagtttcttcagcatggactacatcaaaaccgctaacaaagttgttgaagcagggctgttcgctggttgggttaaacagatcgttaacgacttcgttatcgaagctaacaaaagcaacactatggacgcaatcgctgacatcagtctgatcgttccgtacatcggtctggctctgaacgttggtaacgaaaccgctaaaggtaactttgaaaacgctttcgagatcgctggtgcaagcatcctgctggagttcatcccggaactgctgatcccggttgttggtgctttcctgctggaaagttacatcgacaacaaaaacaagatcatcaaaaccatcgacaacgctctgaccaaacgtaacgaaaaatggagtgatatgtacggtctgatcgttgctcagtggctgagcaccgtcaacacccagttctacaccatcaaagaaggtatgtacaaagctctgaactaccaggctcaggctctggaagagatcatcaaataccgttacaacatctacagtgagaaggaaaagagtaacatcaacatcgacttcaacgacatcaacagcaaactgaacgaaggtatcaaccaggctatcgacaacatcaacaacttcatcaacggttgcagtgttagctacctgatgaagaagatgatcccgctggctgttgaaaaactgctggacttcgacaacaccctgaaaaagaacctgctgaactacatcgacgaaaacaagctgtacctgatcggtagtgctgaatacgaaaaaagtaaagtgaacaaatacctgaagaccatcatgccgttcgacctgagtatctacaccaacgacaccatcctgatcgaaatgttcaacaaatacaactctctagaataatgaaagctt

SEQ ID NO: 3 - DNA, 2620 bp, Artificial Sequence
  source: /note="Description of Artificial Sequence: Synthetic polynucleotide"
ggatccatgccgatcaccatcaacaacttcaactacagcgatccggtggataacaaaaacatcctgtacctggatacccatctgaataccctggcgaacgaaccggaaaaagcgtttcgtatcaccggcaacatttgggttattccggatcgttttagccgtaacagcaacccgaatctgaataaaccgccgcgtgttaccagcccgaaaagcggttattacgatccgaactatctgagcaccgatagcgataaagataccttcctgaaagaaatcatcaaactgttcaaacgcatcaacagccgtgaaattggcgaagaactgatctatcgcctgagcaccgatattccgtttccgggcaacaacaacaccccgatcaacacctttgatttcgatgtggatttcaacagcgttgatgttaaaacccgccagggtaacaattgggtgaaaaccggcagcattaacccaagcgtgattattaccggtccgcgcgaaaacattattgatccggaaaccagcacctttaaactgaccaacaacacctttgcggcgcaggaaggttttggcgcgctgagcattattagcattagcccgcgctttatgctgacctatagcaacgcgaccaacgatgttggtgaaggccgtttcagcaaaagcgaattttgcatggacccgatcctgatcctgatgcatgaactgaaccatgcgatgcataacctgtatggcatcgcgattccgaacgatcagaccattagcagcgtgaccagcaacatcttttacagccagtacaacgtgaaactggaatatgcggaaatctatgcgtttggcggtccgaccattgatctgattccgaaaagcgcgcgcaaatacttcgaagaaaaagcgctggattactatcgcagcattgcgaaacgtctgaacagcattaccaccgcgaatccgagcagcttcaacaaatatatcggcgaatataaacagaaactgatccgcaaatatcgctttgtggtggaaagcagcggcgaagttaccgttaaccgcaataaattcgtggaactgtacaacgaactgacccagatcttcaccgaatttaactatgcgaaaatctataacgtgcagaaccgtaaaatctacctgagcaacgtgtataccccggtgaccgcgaatattctggatgataacgtgtacgatatccagaacggctttaacatcccgaaaagcaacctgaacgttctgtttatgggccagaacctgagccgtaatccggcgctgcgtaaagtgaacccggaaaacatgctgtacctgttcaccaaattttgcgtcgacgcgattgatggtcgtagcctgtacaacaaaaccctgcagtgtcgtgaactgctggtgaaaaacaccgatctgccgtttattggcgatatcagcgatgtgaaaaccgatatcttcctgcgcaaagatatcaacgaagaaaccgaagtgatctactacccggataacgtgagcgttgatcaggtgatcctgagcaaaaacaccagcgaacatggtcagctggatctgctgtatccgagcattgatagcgaaagcgaaattctgccgggcgaaaaccaggtgttttacgataaccgtacccagaacgtggattacctgaacagctattactacctggaaagccagaaactgagcgataacgtggaagattttacctttacccgcagcattgaagaagcgctggataacagcgcgaaagtttacacctattttccgaccctggcgaacaaagttaatgcgggtgttcagggcggtctgtttctgatgtgggcgaacgatgtggtggaagatttcaccaccaacatcctgcgtaaagataccctggataaaatcagcgatgttagcgcgattattccgtatattggtccggcgctgaacattagcaatagcgtgcgtcgtggcaattttaccgaagcgtttgcggttaccggtgtgaccattctgctggaagcgtttccggaatttaccattccggcgctgggtgcgtttgtgatctatagcaaagtgcaggaacgcaacgaaatcatcaaaaccatcgataactgcctggaacagcgtattaaacgctggaaagatagctatgaatggatgatgggcacctggctgagccgtattatcacccagttcaacaacatcagctaccagatgtacgatagcctgaactatcaggcgggtgcgattaaagcgaaaatcgatctggaatacaaaaaatacagcggcagcgataaagaaaacatcaaaagccaggttgaaaacctgaaaaacagcctggatgtgaaaattagcgaagcgatgaataacatcaacaaattcatccgcgaatgcagcgtgacctacctgttcaaaaacatgctgccgaaagtgatcgatgaactgaacgaatttgatcgcaacaccaaagcgaaactgatcaacctgatcgatagccacaacattattctggtgggcgaagtggataaactgaaagcgaaagttaacaacagcttccagaacaccatcccgtttaacatcttcagctataccaacaacagcctgctgaaagatatcatcaacgaatacttcaatctagactaataagctt

SEQ ID NO: 4 - DNA, 2638 bp, Artificial Sequence
  source: /note="Description of Artificial Sequence: Synthetic polynucleotide"
ggatccatgacgtggccagttaaggatttcaactactcagatcctgtaaatgacaacgatattctgtaccttcgcattccacaaaataaactgatcaccacaccagtcaaagcattcatgattactcaaaacatttgggtcattccagaacgcttttctagtgacacaaatccgagtttatctaaacctccgcgtccgacgtccaaatatcagagctattacgatccctcatatctcagtacggacgaacaaaaagatactttccttaaaggtatcattaaactgtttaagcgtattaatgagcgcgatatcgggaaaaagttgattaattatcttgttgtgggttccccgttcatgggcgatagctctacccccgaagacacttttgattttacccgtcatacgacaaacatcgcggtagagaagtttgagaacggatcgtggaaagtcacaaacatcattacacctagcgtcttaatttttggtccgctgccaaacatcttagattatacagccagcctgactttgcaggggcaacagtcgaatccgagtttcgaaggttttggtaccctgagcattctgaaagttgccccggaatttctgctcactttttcagatgtcaccagcaaccagagctcagcagtattaggaaagtcaattttttgcatggacccggttattgcactgatgcacgaactgacgcactctctgcatcaactgtatgggatcaacatccccagtgacaaacgtattcgtccccaggtgtctgaaggatttttctcacaggatgggccgaacgtccagttcgaagagttgtatactttcggaggcctggacgtagagatcattccccagattgagcgcagtcagctgcgtgagaaggcattgggccattataaggatattgcaaaacgcctgaataacattaacaaaacgattccatcttcgtggatctcgaatattgataaatataagaaaatttttagcgagaaatataattttgataaagataatacaggtaactttgtggttaacattgacaaattcaactccctttacagtgatttgacgaatgtaatgagcgaagttgtgtatagttcccaatacaacgttaagaatcgtacccattacttctctcgtcactacctgccggttttcgcgaacatccttgacgataatatttacactattcgtgacggctttaacttgaccaacaagggcttcaatattgaaaattcaggccagaacattgaacgcaacccggccttgcagaaactgtcgagtgaatccgtggttgacctgtttaccaaagtctgcgtcgacaaaagcgaagagaagctgtacgatgacgatgacaaagatcgttggggatcgtccctgcagtgtattaaagtgaaaaacaatcggctgccttatgtagcagataaagatagcattagtcaggagattttcgaaaataaaattatcactgacgaaaccaatgttcagaattattcagataaattttcactggacgaaagcatcttagatggccaagttccgattaacccggaaattgttgatccgttactgccgaacgtgaatatggaaccgttaaacctccctggcgaagagatcgtattttatgatgacattacgaaatatgtggactaccttaattcttattactatttggaaagccagaaactgtccaataacgtggaaaacattactctgaccacaagcgtggaagaggctttaggctactcaaataagatttataccttcctcccgtcgctggcggaaaaagtaaataaaggtgtgcaggctggtctgttcctcaactgggcgaatgaagttgtcgaagactttaccacgaatattatgaaaaaggataccctggataaaatctccgacgtctcggttattatcccatatattggccctgcgttaaatatcggtaatagtgcgctgcgggggaattttaaccaggcctttgctaccgcgggcgtcgcgttcctcctggagggctttcctgaatttactatcccggcgctcggtgtttttacattttactcttccatccaggagcgtgagaaaattatcaaaaccatcgaaaactgcctggagcagcgggtgaaacgctggaaagattcttatcaatggatggtgtcaaactggttatctcgcatcacgacccaattcaaccatattaattaccagatgtatgatagtctgtcgtaccaagctgacgccattaaagccaaaattgatctggaatataaaaagtactctggtagcgataaggagaacatcaaaagccaggtggagaaccttaagaatagtctggatgtgaaaatctctgaagctatgaataacattaacaaattcattcgtgaatgttcggtgacgtacctgttcaagaatatgctgccaaaagttattgatgaactgaataaatttgatctgcgtaccaaaaccgaacttatcaacctcatcgactcccacaacattatccttgtgggcgaagtggatcgtctgaaggccaaagtaaacgagagctttgaaaatacgatgccgtttaatattttttcatataccaataactccttgctgaaagatatcatcaatgaatatttcaatctagaataataagctt

SEQ ID NO: 5 - DNA, 2065 bp, Artificial Sequence
  source: /note="Description of Artificial Sequence: Synthetic polynucleotide"
ggatccatggagtccaatcagccggaaaaaaatggaaccgcgactaaacccgagaattcggggaacactacgtcggaaaacggccagacggaacctgagaagaaactggaactacgaaatgtgtccgatatcgagctatactctcaaaccaatggaacctataggcagcatgtttcattggacggaatcccagaaaatacggatacatatttcgtcaaagtgaagtctagcgcattcaaggatgtatatatccccgttgcgagtattacagaagagaagcggaacggtcaaagcgtttataagattacagcaaaggccgaaaagttacaacaggagttagaaaacaaatacgttgacaatttcactttttatctcgataaaaaggctaaagaggaaaacacgaacttcacgtcatttagtaatctggtcaaagccataaatcaaaatccatctggtacataccatctcgcggcaagtctaaacgcgaatgaagtagaacttggcccggacgagcgttcatacattaaggatacctttactggcagactcataggggaaaaagacggtaagaactatgctatatacaatttgaaaaagcctttatttgagaacctgtcgggcgccaccgtcgagaaattgtcccttaaaaacgtagctataagcggaaagaatgacatcggtagtcttgcaaacgaggctactaacgggacaaagattaaacaagtgcacgtagatgggtgtgtcgacggcatcattacctccaaaactaaatctgacgatgacgataaaaacaaagcgctgaacctgcagtgcattaaaataaagaatgaggatttgacattcatcgcagaaaaaaatagcttcagcgaagagccgttccaagatgagatagtaagctacaacaccaagaacaagccgcttaattttaattactcgttagataaaatcatagttgactacaaccttcaatcgaagatcacgttaccgaatgacagaacaactcctgtcacaaaaggaattccctatgcacctgagtataagtcaaatgccgcgtcaacaatagagattcataatatagatgacaacaccatctatcaatatctgtacgctcagaaaagtccaacaactcttcagcgtataacaatgaccaatagtgtcgatgacgcattgataaattctaccaagatatactcttatttcccgagcgtcatctccaaagttaatcaaggtgctcaaggcattctatttttgcaatgggtccgagacatcatagatgacttcactaatgagtcgtctcagaaaaccacgattgataaaatatcagatgtttccaccatcgtcccctacatcggacctgcgcttaacattgtgaagcaggggtatgaggggaattttatcggagcgttagaaactacgggggttgtgctattacttgaatacataccagagataacattgcccgttatagcggccctcagtatcgcagaatcaagtacacaaaaagaaaagataatcaaaacaatcgacaacttcctagaaaagaggtacgaaaaatggatagaggtttataaactcgtgaaagcgaaatggttaggcactgttaatacgcagttccaaaagagatcctatcaaatgtatagatcactggagtaccaggtggatgccataaagaaaattatcgactatgaatataaaatatattcaggtccagataaggagcagatagctgatgaaataaacaatttaaaaaacaaacttgaagagaaggcgaataaggccatgatcaatatcaatatttttatgcgagaatcttcacgatcttttttggtaaatcagatgattaacgaagccaaaaagcagctgcttgagttcgacacacagtccaaaaacatactaatgcaatatatcaaagcaaactcaaaattcattggaattactgagctgaagaaactggaatccaaaataaataaagtattctctaccccgatcccgttctcttactctaaaaaccttgactgctgggtagataacgaagaagatattgacgttctagagtaataagctt

SEQ ID NO: 6 - DNA, 219 bp, Artificial Sequence
  source: /note="Description of Artificial Sequence: Synthetic polynucleotide"
catatgccggttggatccatccaggtcgactttaaactgcagggtgttactctagagggcggtggcggtagcggtggcggtggcagcggcggtggcggtagcgcactagtgggcagctcatttctgtctccggaacatcaacgggtgcagcagcgtaaagagagtaaaaagccgccagcgaaattacagcctcgctaatagaagcttaagggcgaattc

SEQ ID NO: 7 - DNA, 2784 bp, Artificial Sequence
  source: /note="Description of Artificial Sequence: Synthetic polynucleotide"
catatgccggttggatccatgccgatcaccatcaacaacttcaactacagcgatccggtggataacaaaaacatcctgtacctggatacccatctgaataccctggcgaacgaaccggaaaaagcgtttcgtatcaccggcaacatttgggttattccggatcgttttagccgtaacagcaacccgaatctgaataaaccgccgcgtgttaccagcccgaaaagcggttattacgatccgaactatctgagcaccgatagcgataaagataccttcctgaaagaaatcatcaaactgttcaaacgcatcaacagccgtgaaattggcgaagaactgatctatcgcctgagcaccgatattccgtttccgggcaacaacaacaccccgatcaacacctttgatttcgatgtggatttcaacagcgttgatgttaaaacccgccagggtaacaattgggtgaaaaccggcagcattaacccgagcgtgattattaccggtccgcgcgaaaacattattgatccggaaaccagcacctttaaactgaccaacaacacctttgcggcgcaggaaggttttggcgcgctgagcattattagcattagcccgcgctttatgctgacctatagcaacgcgaccaacgatgttggtgaaggccgtttcagcaaaagcgaattttgcatggacccgatcctgatcctgatgcatgaactgaaccatgcgatgcataacctgtatggcatcgcgattccgaacgatcagaccattagcagcgtgaccagcaacatcttttacagccagtacaacgtgaaactggaatatgcggaaatctatgcgtttggcggtccgaccattgatctgattccgaaaagcgcgcgcaaatacttcgaagaaaaagcgctggattactatcgcagcattgcgaaacgtctgaacagcattaccaccgcgaatccgagcagcttcaacaaatatatcggcgaatataaacagaaactgatccgcaaatatcgctttgtggtggaaagcagcggcgaagttaccgttaaccgcaataaattcgtggaactgtacaacgaactgacccagatcttcaccgaatttaactatgcgaaaatctataacgtgcagaaccgtaaaatctacctgagcaacgtgtataccccggtgaccgcgaatattctggatgataacgtgtacgatatccagaacggctttaacatcccgaaaagcaacctgaacgttctgtttatgggccagaacctgagccgtaatccggcgctgcgtaaagtgaacccggaaaacatgctgtacctgttcaccaaattttgcgtcgacgcgattgatggtcgtagcctgtacaacaaaaccctgcagtgtcgtgaactgctggtgaaaaacaccgatctgccgtttattggcgatatcagcgatgtgaaaaccgatatcttcctgcgcaaagatatcaacgaagaaaccgaagtgatctactacccggataacgtgagcgttgatcaggtgatcctgagcaaaaacaccagcgaacatggtcagctggatctgctgtatccgagcattgatagcgaaagcgaaattctgccgggcgaaaaccaggtgttttacgataaccgtacccagaacgtggattacctgaacagctattactacctggaaagccagaaactgagcgataacgtggaagattttacctttacccgcagcattgaagaagcgctggataacagcgcgaaagtttacacctattttccgaccctggcgaacaaagttaatgcgggtgttcagggcggtctgtttctgatgtgggcgaacgatgtggtggaagatttcaccaccaacatcctgcgtaaagataccctggataaaatcagcgatgttagcgcgattattccgtatattggtccggcgctgaacattagcaatagcgtgcgtcgtggcaattttaccgaagcgtttgcggttaccggtgtgaccattctgctggaagcgtttccggaatttaccattccggcgctgggtgcgtttgtgatctatagcaaagtgcaggaacgcaacgaaatcatcaaaaccatcgataactgcctggaacagcgtattaaacgctggaaagatagctatgaatggatgatgggcacctggctgagccgtattatcacccagttcaacaacatcagctaccagatgtacgatagcctgaactatcaggcgggtgcgattaaagcgaaaatcgatctggaatacaaaaaatacagcggcagcgataaagaaaacatcaaaagccaggttgaaaacctgaaaaacagcctggatgtgaaaattagcgaagcgatgaataacatcaacaaattcatccgcgaatgcagcgtgacctacctgttcaaaaacatgctgccgaaagtgatcgatgaactgaacgaatttgatcgcaacaccaaagcgaaactgatcaacctgatcgatagccacaacattattctggtgggcgaagtggataaactgaaagcgaaagttaacaacagcttccagaacaccatcccgtttaacatcttcagctataccaacaacagcctgctgaaagatatcatcaacgaatacttcaatctagagggcggtggcggtagcggtggcggtggcagcggcggtggcggtagcgcactagtgggcagctcatttctgtctccggaacatcaacgggtgcagcagcgtaaagagagtaaaaagccgccagcgaaattacagcctcgctaatagaagcttaagggcgaattc

SEQ ID NO: 8 - protein, 913 aa, Artificial Sequence
  source: /note="Description of Artificial Sequence: Synthetic polypeptide"
PITINNFNYSDPVDNKNILYLDTHLNTLANEPEKAFRITGNIWVIPDRFSRNSNPNLNKPPRVTSPKSGYYDPNYLSTDSDKDTFLKEIIKLFKRINSREIGEELIYRLSTDIPFPGNNNTPINTFDFDVDFNSVDVKTRQGNNWVKTGSINPSVIITGPRENIIDPETSTFKLTNNTFAAQEGFGALSIISISPRFMLTYSNATNDVGEGRFSKSEFCMDPILILMHELNHAMHNLYGIAIPNDQTISSVTSNIFYSQYNVKLEYAEIYAFGGPTIDLIPKSARKYFEEKALDYYRSIAKRLNSITTANPSSFNKYIGEYKQKLIRKYRFVVESSGEVTVNRNKFVELYNELTQIFTEFNYAKIYNVQNRKIYLSNVYTPVTANILDDNVYDIQNGFNIPKSNLNVLFMGQNLSRNPALRKVNPENMLYLFTKFCVDAIDGRSLYNKTLQCRELLVKNTDLPFIGDISDVKTDIFLRKDINEETEVIYYPDNVSVDQVILSKNTSEHGQLDLLYPSIDSESEILPGENQVFYDNRTQNVDYLNSYYYLESQKLSDNVEDFTFTRSIEEALDNSAKVYTYFPTLANKVNAGVQGGLFLMWANDVVEDFTTNILRKDTLDKISDVSAIIPYIGPALNISNSVRRGNFTEAFAVTGVTILLEAFPEFTIPALGAFVIYSKVQERNEIIKTIDNCLEQRIKRWKDSYEWMMGTWLSRIITQFNNISYQMYDSLNYQAGAIKAKIDLEYKKYSGSDKENIKSQVENLKNSLDVKISEAMNNINKFIRECSVTYLFKNMLPKVIDELNEFDRNTKAKLINLIDSHNIILVGEVDKLKAKVNNSFQNTIPFNIFSYTNNSLLKDIINEYFNLEGGGGSGGGGSGGGGSALVGSSFLSPEHQRVQQRKESKKPPAKLQPR

SEQ ID NO: 9 - protein, 931 aa, Artificial Sequence
  source: /note="Description of Artificial Sequence: Synthetic polypeptide"
TWPVKDFNYSDPVNDNDILYLRIPQNKLITTPVKAFMITQNIWVIPERFSSDTNPSLSKPPRPTSKYQSYYDPSYLSTDEQKDTFLKGIIKLFKRINERDIGKKLINYLVVGSPFMGDSSTPEDTFDFTRHTTNIAVEKFENGSWKVTNIITPSVLIFGPLPNILDYTASLTLQGQQSNPSFEGFGTLSILKVAPEFLLTFSDVTSNQSSAVLGKSIFCMDPVIALMHELTHSLHQLYGINIPSDKRIRPQVSEGFFSQDGPNVQFEELYTFGGLDVEIIPQIERSQLREKALGHYKDIAKRLNNINKTIPSSWISNIDKYKKIFSEKYNFDKDNTGNFVVNIDKFNSLYSDLTNVMSEVVYSSQYNVKNRTHYFSRHYLPVFANILDDNIYTIRDGFNLTNKGFNIENSGQNIERNPALQKLSSESVVDLFTKVCVDKSEEKLYDDDDKDRWGSSLQCIKVKNNRLPYVADKDSISQEIFENKIITDETNVQNYSDKFSLDESILDGQVPINPEIVDPLLPNVNMEPLNLPGEEIVFYDDITKYVDYLNSYYYLESQKLSNNVENITLTTSVEEALGYSNKIYTFLPSLAEKVNKGVQAGLFLNWANEVVEDFTTNIMKKDTLDKISDVSVIIPYIGPALNIGNSALRGNFNQAFATAGVAFLLEGFPEFTIPALGVFTFYSSIQEREKIIKTIENCLEQRVKRWKDSYQWMVSNWLSRITTQFNHINYQMYDSLSYQADAIKAKIDLEYKKYSGSDKENIKSQVENLKNSLDVKISEAMNNINKFIRECSVTYLFKNMLPKVIDELNKFDLRTKTELINLIDSHNIILVGEVDRLKAKVNESFENTMPFNIFSYTNNSLLKDIINEYFNLEGGGGSGGGGSGGGGSALVYADAIFTNSYRKVLGQLSARKLLQDIMSRQQGESNQERGA

SEQ ID NO: 10 - protein, 944 aa, Artificial Sequence
  source: /note="Description of Artificial Sequence: Synthetic polypeptide"
TWPVKDFNYSDPVNDNDILYLRIPQNKLITTPVKAFMITQNIWVIPERFSSDTNPSLSKPPRPTSKYQSYYDPSYLSTDEQKDTFLKGIIKLFKRINERDIGKKLINYLVVGSPFMGDSSTPEDTFDFTRHTTNIAVEKFENGSWKVTNIITPSVLIFGPLPNILDYTASLTLQGQQSNPSFEGFGTLSILKVAPEFLLTFSDVTSNQSSAVLGKSIFCMDPVIALMHELTHSLHQLYGINIPSDKRIRPQVSEGFFSQDGPNVQFEELYTFGGLDVEIIPQIERSQLREKALGHYKDIAKRLNNINKTIPSSWISNIDKYKKIFSEKYNFDKDNTGNFVVNIDKFNSLYSDLTNVMSEVVYSSQYNVKNRTHYFSRHYLPVFANILDDNIYTIRDGFNLTNKGFNIENSGQNIERNPALQKLSSESVVDLFTKVCVDKSEEKLYDDDDKDRWGSSLQCIKVKNNRLPYVADKDSISQEIFENKIITDETNVQNYSDKFSLDESILDGQVPINPEIVDPLLPNVNMEPLNLPGEEIVFYDDITKYVDYLNSYYYLESQKLSNNVENITLTTSVEEALGYSNKIYTFLPSLAEKVNKGVQAGLFLNWANEVVEDFTTNIMKKDTLDKISDVSVIIPYIGPALNIGNSALRGNFNQAFATAGVAFLLEGFPEFTIPALGVFTFYSSIQEREKIIKTIENCLEQRVKRWKDSYQWMVSNWLSRITTQFNHINYQMYDSLSYQADAIKAKIDLEYKKYSGSDKENIKSQVENLKNSLDVKISEAMNNINKFIRECSVTYLFKNMLPKVIDELNKFDLRTKTELINLIDSHNIILVGEVDRLKAKVNESFENTMPFNIFSYTNNSLLKDIINEYFNLEGGGGSGGGGSGGGGSALVNSDSECPLSHDGYCLHDGVCMYIEALDKYACNCVVGYIGERCQYRDLKWWELR

SEQ ID NO: 11 - protein, 1134 aa, Artificial Sequence [sequence omitted]

SEQ ID NO: 12 - protein, 898 aa, Artificial Sequence
  source: /note="Description of Artificial Sequence: Synthetic polypeptide"
TWPVKDFNYSDPVNDNDILYLRIPQNKLITTPVKAFMITQNIWVIPERFSSDTNPSLSKPPRPTSKYQSYYDPSYLSTDEQKDTFLKGIIKLFKRINERDIGKKLINYLVVGSPFMGDSSTPEDTFDFTRHTTNIAVEKFENGSWKVTNIITPSVLIFGPLPNILDYTASLTLQGQQSNPSFEGFGTLSILKVAPEFLLTFSDVTSNQSSAVLGKSIFCMDPVIALMHELTHSLHQLYGINIPSDKRIRPQVSEGFFSQDGPNVQFEELYTFGGLDVEIIPQIERSQLREKALGHYKDIAKRLNNINKTIPSSWISNIDKYKKIFSEKYNFDKDNTGNFVVNIDKFNSLYSDLTNVMSEVVYSSQYNVKNRTHYFSRHYLPVFANILDDNIYTIRDGFNLTNKGFNIENSGQNIERNPALQKLSSESVVDLFTKVCVDKSEEKLYDDDDKDRWGSSLQCIKVKNNRLPYVADKDSISQEIFENKIITDETNVQNYSDKFSLDESILDGQVPINPEIVDPLLPNVNMEPLNLPGEEIVFYDDITKYVDYLNSYYYLESQKLSNNVENITLTTSVEEALGYSNKIYTFLPSLAEKVNKGVQAGLFLNWANEVVEDFTTNIMKKDTLDKISDVSVIIPYIGPALNIGNSALRGNFNQAFATAGVAFLLEGFPEFTIPALGVFTFYSSIQEREKIIKTIENCLEQRVKRWKDSYQWMVSNWLSRITTQFNHINYQMYDSLSYQADAIKAKIDLEYKKYSGSDKENIKSQVENLKNSLDVKISEAMNNINKFIRECSVTYLFKNMLPKVIDELNKFDLRTKTELINLIDSHNIILVGEVDRLKAKVNESFENTMPFNIFSYTNNSLLKDIINEYFNLEGGGGSGGGGSGGGGSALVSCHLPWA

SEQ ID NO: 13 - protein, 919 aa, Artificial Sequence
  source: /note="Description of Artificial Sequence: Synthetic polypeptide"
TWPVKDFNYSDPVNDNDILYLRIPQNKLITTPVKAFMITQNIWVIPERFSSDTNPSLSKPPRPTSKYQSYYDPSYLSTDEQKDTFLKGIIKLFKRINERDIGKKLINYLVVGSPFMGDSSTPEDTFDFTRHTTNIAVEKFENGSWKVTNIITPSVLIFGPLPNILDYTASLTLQGQQSNPSFEGFGTLSILKVAPEFLLTFSDVTSNQSSAVLGKSIFCMDPVIALMHELTHSLHQLYGINIPSDKRIRPQVSEGFFSQDGPNVQFEELYTFGGLDVEIIPQIERSQLREKALGHYKDIAKRLNNINKTIPSSWISNIDKYKKIFSEKYNFDKDNTGNFVVNIDKFNSLYSDLTNVMSEVVYSSQYNVKNRTHYFSRHYLPVFANILDDNIYTIRDGFNLTNKGFNIENSGQNIERNPALQKLSSESVVDLFTKVCVDKSEEKLYDDDDKDRWGSSLQCIKVKNNRLPYVADKDSISQEIFENKIITDETNVQNYSDKFSLDESILDGQVPINPEIVDPLLPNVNMEPLNLPGEEIVFYDDITKYVDYLNSYYYLESQKLSNNVENITLTTSVEEALGYSNKIYTFLPSLAEKVNKGVQAGLFLNWANEVVEDFTTNIMKKDTLDKISDVSVIIPYIGPALNIGNSALRGNFNQAFATAGVAFLLEGFPEFTIPALGVFTFYSSIQEREKIIKTIENCLEQRVKRWKDSYQWMVSNWLSRITTQFNHINYQMYDSLSYQADAIKAKIDLEYKKYSGSDKENIKSQVENLKNSLDVKISEAMNNINKFIRECSVTYLFKNMLPKVIDELNKFDLRTKTELINLIDSHNIILVGEVDRLKAKVNESFENTMPFNIFSYTNNSLLKDIINEYFNLEGGGGSGGGGSGGGGSALVHSDAVFTDNYTRLRKQMAVKKYLNSILN

SEQ ID NO: 14 - protein, 892 aa, Artificial Sequence
  source: /note="Description of Artificial Sequence: Synthetic polypeptide"
PITINNFNYSDPVDNKNILYLDTHLNTLANEPEKAFRITGNIWVIPDRFSRNSNPNLNKPPRVTSPKSGYYDPNYLSTDSDKDTFLKEIIKLFKRINSREIGEELIYRLSTDIPFPGNNNTPINTFDFDVDFNSVDVKTRQGNNWVKTGSINPSVIITGPRENIIDPETSTFKLTNNTFAAQEGFGALSIISISPRFMLTYSNATNDVGEGRFSKSEFCMDPILILMHELNHAMHNLYGIAIPNDQTISSVTSNIFYSQYNVKLEYAEIYAFGGPTIDLIPKSARKYFEEKALDYYRSIAKRLNSITTANPSSFNKYIGEYKQKLIRKYRFVVESSGEVTVNRNKFVELYNELTQIFTEFNYAKIYNVQNRKIYLSNVYTPVTANILDDNVYDIQNGFNIPKSNLNVLFMGQNLSRNPALRKVNPENMLYLFTKFCVDAIDGRSLYNKTLQCRELLVKNTDLPFIGDISDVKTDIFLRKDINEETEVIYYPDNVSVDQVILSKNTSEHGQLDLLYPSIDSESEILPGENQVFYDNRTQNVDYLNSYYYLESQKLSDNVEDFTFTRSIEEALDNSAKVYTYFPTLANKVNAGVQGGLFLMWANDVVEDFTTNILRKDTLDKISDVSAIIPYIGPALNISNSVRRGNFTEAFAVTGVTILLEAFPEFTIPALGAFVIYSKVQERNEIIKTIDNCLEQRIKRWKDSYEWMMGTWLSRIITQFNNISYQMYDSLNYQAGAIKAKIDLEYKKYSGSDKENIKSQVENLKNSLDVKISEAMNNINKFIRECSVTYLFKNMLPKVIDELNEFDRNTKAKLINLIDSHNIILVGEVDKLKAKVNNSFQNTIPFNIFSYTNNSLLKDIINEYFNLEGGGGSGGGGSGGGGSALVSCHLPWA

SEQ ID NO: 15 - protein, 955 aa, Artificial Sequence
  source: /note="Description of Artificial Sequence: Synthetic polypeptide"
PITINNFNYSDPVDNKNILYLDTHLNTLANEPEKAFRITGNIWVIPDRFSRNSNPNLNKPPRVTSPKSGYYDPNYLSTDSDKDTFLKEIIKLFKRINSREIGEELIYRLSTDIPFPGNNNTPINTFDFDVDFNSVDVKTRQGNNWVKTGSINPSVIITGPRENIIDPETSTFKLTNNTFAAQEGFGALSIISISPRFMLTYSNATNDVGEGRFSKSEFCMDPILILMHELNHAMHNLYGIAIPNDQTISSVTSNIFYSQYNVKLEYAEIYAFGGPTIDLIPKSARKYFEEKALDYYRSIAKRLNSITTANPSSFNKYIGEYKQKLIRKYRFVVESSGEVTVNRNKFVELYNELTQIFTEFNYAKIYNVQNRKIYLSNVYTPVTANILDDNVYDIQNGFNIPKSNLNVLFMGQNLSRNPALRKVNPENMLYLFTKFCVDAIDGRSLYNKTLQCRELLVKNTDLPFIGDISDVKTDIFLRKDINEETEVIYYPDNVSVDQVILSKNTSEHGQLDLLYPSIDSESEILPGENQVFYDNRTQNVDYLNSYYYLESQKLSDNVEDFTFTRSIEEALDNSAKVYTYFPTLANKVNAGVQGGLFLMWANDVVEDFTTNILRKDTLDKISDVSAIIPYIGPALNISNSVRRGNFTEAFAVTGVTILLEAFPEFTIPALGAFVIYSKVQERNEIIKTIDNCLEQRIKRWKDSYEWMMGTWLSRIITQFNNISYQMYDSLNYQAGAIKAKIDLEYKKYSGSDKENIKSQVENLKNSLDVKISEAMNNINKFIRECSVTYLFKNMLPKVIDELNEFDRNTKAKLINLIDSHNIILVGEVDKLKAKVNNSFQNTIPFNIFSYTNNSLLKDIINEYFNLEGGGGSGGGGSGGGGSALVGPETLCGAELVDALQFVCGDRGFYFNKPTGYGSSSRRAPQTGIVDECCFRSCDLRRLEMYCAPLKPAKSA

SEQ ID NO: 16 - protein, 919 aa, Artificial Sequence
  source: /note="Description of Artificial Sequence: Synthetic polypeptide"
PITINNFNYSDPVDNKNILYLDTHLNTLANEPEKAFRITGNIWVIPDRFSRNSNPNLNKPPRVTSPKSGYYDPNYLSTDSDKDTFLKEIIKLFKRINSREIGEELIYRLSTDIPFPGNNNTPINTFDFDVDFNSVDVKTRQGNNWVKTGSINPSVIITGPRENIIDPETSTFKLTNNTFAAQEGFGALSIISISPRFMLTYSNATNDVGEGRFSKSEFCMDPILILMHELNHAMHNLYGIAIPNDQTISSVTSNIFYSQYNVKLEYAEIYAFGGPTIDLIPKSARKYFEEKALDYYRSIAKRLNSITTANPSSFNKYIGEYKQKLIRKYRFVVESSGEVTVNRNKFVELYNELTQIFTEFNYAKIYNVQNRKIYLSNVYTPVTANILDDNVYDIQNGFNIPKSNLNVLFMGQNLSRNPALRKVNPENMLYLFTKFCVDAIDGRSLYNKTLQCRELLVKNTDLPFIGDISDVKTDIFLRKDINEETEVIYYPDNVSVDQVILSKNTSEHGQLDLLYPSIDSESEILPGENQVFYDNRTQNVDYLNSYYYLESQKLSDNVEDFTFTRSIEEALDNSAKVYTYFPTLANKVNAGVQGGLFLMWANDVVEDFTTNILRKDTLDKISDVSAIIPYIGPALNISNSVRRGNFTEAFAVTGVTILLEAFPEFTIPALGAFVIYSKVQERNEIIKTIDNCLEQRIKRWKDSYEWMMGTWLSRIITQFNNISYQMYDSLNYQAGAIKAKIDLEYKKYSGSDKENIKSQVENLKNSLDVKISEAMNNINKFIRECSVTYLFKNMLPKVIDELNEFDRNTKAKLINLIDSHNIILVGEVDKLKAKVNNSFQNTIPFNIFSYTNNSLLKDIINEYFNLEGGGGSGGGGSGGGGSGGGGSGGGGSGGGGSGGGGSALVAGCKNFFWKTFTSC

SEQ ID NO: 17 - protein, 919 aa, Artificial Sequence
  source: /note="Description of Artificial Sequence: Synthetic polypeptide"
TWPVKDFNYSDPVNDNDILYLRIPQNKLITTPVKAFMITQNIWVIPERFSSDTNPSLSKPPRPTSKYQSYYDPSYLSTDEQKDTFLKGIIKLFKRINERDIGKKLINYLVVGSPFMGDSSTPEDTFDFTRHTTNIAVEKFENGSWKVTNIITPSVLIFGPLPNILDYTASLTLQGQQSNPSFEGFGTLSILKVAPEFLLTFSDVTSNQSSAVLGKSIFCMDPVIALMHELTHSLHQLYGINIPSDKRIRPQVSEGFFSQDGPNVQFEELYTFGGLDVEIIPQIERSQLREKALGHYKDIAKRLNNINKTIPSSWISNIDKYKKIFSEKYNFDKDNTGNFVVNIDKFNSLYSDLTNVMSEVVYSSQYNVKNRTHYFSRHYLPVFANILDDNIYTIRDGFNLTNKGFNIENSGQNIERNPALQKLSSESVVDLFTKVCVDKSEEKLYDDDDKDRWGSSLQCIKVKNNRLPYVADKDSISQEIFENKIITDETNVQNYSDKFSLDESILDGQVPINPEIVDPLLPNVNMEPLNLPGEEIVFYDDITKYVDYLNSYYYLESQKLSNNVENITLTTSVEEALGYSNKIYTFLPSLAEKVNKGVQAGLFLNWANEVVEDFTTNIMKKDTLDKISDVSVIIPYIGPALNIGNSALRGNFNQAFATAGVAFLLEGFPEFTIPALGVFTFYSSIQEREKIIKTIENCLEQRVKRWKDSYQWMVSNWLSRITTQFNHINYQMYDSLSYQADAIKAKIDLEYKKYSGSDKENIKSQVENLKNSLDVKISEAMNNINKFIRECSVTYLFKNMLPKVIDELNKFDLRTKTELINLIDSHNIILVGEVDRLKAKVNESFENTMPFNIFSYTNNSLLKDIINEYFNLEGGGGSGGGGSGGGGSALVGSSFLSPEHQRVQQRKESKKPPAKLQPR

SEQ ID NO: 18 - protein, 961 aa, Artificial Sequence
  source: /note="Description of Artificial Sequence: Synthetic polypeptide"
TWPVKDFNYSDPVNDNDILYLRIPQNKLITTPVKAFMITQNIWVIPERFSSDTNPSLSKPPRPTSKYQSYYDPSYLSTDEQKDTFLKGIIKLFKRINERDIGKKLINYLVVGSPFMGDSSTPEDTFDFTRHTTNIAVEKFENGSWKVTNIITPSVLIFGPLPNILDYTASLTLQGQQSNPSFEGFGTLSILKVAPEFLLTFSDVTSNQSSAVLGKSIFCMDPVIALMHELTHSLHQLYGINIPSDKRIRPQVSEGFFSQDGPNVQFEELYTFGGLDVEIIPQIERSQLREKALGHYKDIAKRLNNINKTIPSSWISNIDKYKKIFSEKYNFDKDNTGNFVVNIDKFNSLYSDLTNVMSEVVYSSQYNVKNRTHYFSRHYLPVFANILDDNIYTIRDGFNLTNKGFNIENSGQNIERNPALQKLSSESVVDLFTKVCVDKSEEKLYDDDDKDRWGSSLQCIKVKNNRLPYVADKDSISQEIFENKIITDETNVQNYSDKFSLDESILDGQVPINPEIVDPLLPNVNMEPLNLPGEEIVFYDDITKYVDYLNSYYYLESQKLSNNVENITLTTSVEEALGYSNKIYTFLPSLAEKVNKGVQAGLFLNWANEVVEDFTTNIMKKDTLDKISDVSVIIPYIGPALNIGNSALRGNFNQAFATAGVAFLLEGFPEFTIPALGVFTFYSSIQEREKIIKTIENCLEQRVKRWKDSYQWMVSNWLSRITTQFNHINYQMYDSLSYQADAIKAKIDLEYKKYSGSDKENIKSQVENLKNSLDVKISEAMNNINKFIRECSVTYLFKNMLPKVIDELNKFDLRTKTELINLIDSHNIILVGEVDRLKAKVNESFENTMPFNIFSYTNNSLLKDIINEYFNLEGGGGSGGGGSGGGGSALVGPETLCGAELVDALQFVCGDRGFYFNKPTGYGSSSRRAPQTGIVDECCFRSCDLRRLEMYCAPLKPAKSA

SEQ ID NO: 19 - protein, 1108 aa, Artificial Sequence
  source: /note="Description of Artificial Sequence: Synthetic polypeptide"
PITINNFNYSDPVDNKNILYLDTHLNTLANEPEKAFRITGNIWVIPDRFSRNSNPNLNKPPRVTSPKSGYYDPNYLSTDSDKDTFLKEIIKLFKRINSREIGEELIYRLSTDIPFPGNNNTPINTFDFDVDFNSVDVKTRQGNNWVKTGSINPSVIITGPRENIIDPETSTFKLTNNTFAAQEGFGALSIISISPRFMLTYSNATNDVGEGRFSKSEFCMDPILILMHELNHAMHNLYGIAIPNDQTISSVTSNIFYSQYNVKLEYAEIYAFGGPTIDLIPKSARKYFEEKALDYYRSIAKRLNSITTANPSSFNKYIGEYKQKLIRKYRFVVESSGEVTVNRNKFVELYNELTQIFTEFNYAKIYNVQNRKIYLSNVYTPVTANILDDNVYDIQNGFNIPKSNLNVLFMGQNLSRNPALRKVNPENMLYLFTKFCVDAIDGRSLYNKTLQCRELLVKNTDLPFIGDISDVKTDIFLRKDINEETEVIYYPDNVSVDQVILSKNTSEHGQLDLLYPSIDSESEILPGENQVFYDNRTQNVDYLNSYYYLESQKLSDNVEDFTFTRSIEEALDNSAKVYTYFPTLANKVNAGVQGGLFLMWANDVVEDFTTNILRKDTLDKISDVSAIIPYIGPALNISNSVRRGNFTEAFAVTGVTILLEAFPEFTIPALGAFVIYSKVQERNEIIKTIDNCLEQRIKRWKDSYEWMMGTWLSRIITQFNNISYQMYDSLNYQAGAIKAKIDLEYKKYSGSDKENIKSQVENLKNSLDVKISEAMNNINKFIRECSVTYLFKNMLPKVIDELNEFDRNTKAKLINLIDSHNIILVGEVDKLKAKVNNSFQNTIPFNIFSYTNNSLLKDIINEYFNLEGGGGSGGGGSGGGGSALVEPHSESNVPAGHTIPQAHWTKLQHSLDTALRRARSAPAAAIAARVAGQTRNITVDPRLFKKRRLRSPRVLFSTQPPREAADTQDLDFEVGGAAPFNRTHRSKRSSSHPIFHRGEFSVCDSVSVWVGDKTTATDIKGKEVMVLGEVNINNSVFKQYFFETKCRDPNPVDSGCRGIDSKHWNSYCTTTHTFVKALTMDGKQAAWRFIRIDTACVCVLSRKAVRRA

SEQ ID NO: 20 - protein, 910 aa, Artificial Sequence
  source: /note="Description of Artificial Sequence: Synthetic polypeptide"
TWPVKDFNYSDPVNDNDILYLRIPQNKLITTPVKAFMITQNIWVIPERFSSDTNPSLSKPPRPTSKYQSYYDPSYLSTDEQKDTFLKGIIKLFKRINERDIGKKLINYLVVGSPFMGDSSTPEDTFDFTRHTTNIAVEKFENGSWKVTNIITPSVLIFGPLPNILDYTASLTLQGQQSNPSFEGFGTLSILKVAPEFLLTFSDVTSNQSSAVLGKSIFCMDPVIALMHELTHSLHQLYGINIPSDKRIRPQVSEGFFSQDGPNVQFEELYTFGGLDVEIIPQIERSQLREKALGHYKDIAKRLNNINKTIPSSWISNIDKYKKIFSEKYNFDKDNTGNFVVNIDKFNSLYSDLTNVMSEVVYSSQYNVKNRTHYFSRHYLPVFANILDDNIYTIRDGFNLTNKGFNIENSGQNIERNPALQKLSSESVVDLFTKVCVDKSEEKLYDDDDKDRWGSSLQCIKVKNNRLPYVADKDSISQEIFENKIITDETNVQNYSDKFSLDESILDGQVPINPEIVDPLLPNVNMEPLNLPGEEIVFYDDITKYVDYLNSYYYLESQKLSNNVENITLTTSVEEALGYSNKIYTFLPSLAEKVNKGVQAGLFLNWANEVVEDFTTNIMKKDTLDKISDVSVIIPYIGPALNIGNSALRGNFNQAFATAGVAFLLEGFPEFTIPALGVFTFYSSIQEREKIIKTIENCLEQRVKRWKDSYQWMVSNWLSRITTQFNHINYQMYDSLSYQADAIKAKIDLEYKKYSGSDKENIKSQVENLKNSLDVKISEAMNNINKFIRECSVTYLFKNMLPKVIDELNKFDLRTKTELINLIDSHNIILVGEVDRLKAKVNESFENTMPFNIFSYTNNSLLKDIINEYFNLEGGGGSGGGGSGGGGSGGGGSALVAGCKNFFWKTFTSC

SEQ ID NO: 21 - protein, 913 aa, Artificial Sequence
  source: /note="Description of Artificial Sequence: Synthetic polypeptide"
PITINNFNYSDPVDNKNILYLDTHLNTLANEPEKAFRITGNIWVIPDRFSRNSNPNLNKPPRVTSPKSGYYDPNYLSTDSDKDTFLKEIIKLFKRINSREIGEELIYRLSTDIPFPGNNNTPINTFDFDVDFNSVDVKTRQGNNWVKTGSINPSVIITGPRENIIDPETSTFKLTNNTFAAQEGFGALSIISISPRFMLTYSNATNDVGEGRFSKSEFCMDPILILMHELNHAMHNLYGIAIPNDQTISSVTSNIFYSQYNVKLEYAEIYAFGGPTIDLIPKSARKYFEEKALDYYRSIAKRLNSITTANPSSFNKYIGEYKQKLIRKYRFVVESSGEVTVNRNKFVELYNELTQIFTEFNYAKIYNVQNRKIYLSNVYTPVTANILDDNVYDIQNGFNIPKSNLNVLFMGQNLSRNPALRKVNPENMLYLFTKFCVDAIDGRSLYNKTLQCRELLVKNTDLPFIGDISDVKTDIFLRKDINEETEVIYYPDNVSVDQVILSKNTSEHGQLDLLYPSIDSESEILPGENQVFYDNRTQNVDYLNSYYYLESQKLSDNVEDFTFTRSIEEALDNSAKVYTYFPTLANKVNAGVQGGLFLMWANDVVEDFTTNILRKDTLDKISDVSAIIPYIGPALNISNSVRRGNFTEAFAVTGVTILLEAFPEFTIPALGAFVIYSKVQERNEIIKTIDNCLEQRIKRWKDSYEWMMGTWLSRIITQFNNISYQMYDSLNYQAGAIKAKIDLEYKKYSGSDKENIKSQVENLKNSLDVKISEAMNNINKFIRECSVTYLFKNMLPKVIDELNEFDRNTKAKLINLIDSHNIILVGEVDKLKAKVNNSFQNTIPFNIFSYTNNSLLKDIINEYFNLEGGGGSGGGGSGGGGSALVHSDAVFTDNYTRLRKQMAVKKYLNSILN

SEQ ID NO: 22 - protein, 912 aa, Artificial Sequence
  source: /note="Description of Artificial Sequence: Synthetic polypeptide"
EFVNKQFNYKDPVNGVDIAYIKIPNAGQMQPVKAFKIHNKIWVIPERDTFTNPEEGDLNPPPEAKQVPVSYYDSTYLSTDNEKDNYLKGVTKLFERIYSTDLGRMLLTSIVRGIPFWGGSTIDTELKVIDTNCINVIQPDGSYRSEELNLVIIGPSADIIQFECKSFGHEVLNLTRNGYGSTQYIRFSPDFTFGFEESLEVDTNPLLGAGKFATDPAVTLAHELIHAGHRLYGIAINPNRVFKVNTNAYYEMSGLEVSFEELRTFGGHDAKFIDSLQENEFRLYYYNKFKDIASTLNKAKSIVGTTASLQYMKNVFKEKYLLSEDTSGKFSVDKLKFDKLYKMLTEIYTEDNFVKFFKVLNRKTYLNFDKAVFKINIVPKVNYTIYDGFNLRNTNLAANFNGQNTEINNMNFTKLKNFTGLFEFYKLLCVDGIITSKTKSDDDDKNKALNLQCIKVNNWDLFFSPSEDNFTNDLNKGEEITSDTNIEAAEENISLDLIQQYYLTFNFDNEPENISIENLSSDIIGQLELMPNIERFPNGKKYELDKYTMFHYLRAQEFEHGKSRIALTNSVNEALLNPSRVYTFFSSDYVKKVNKATEAAMFLGWVEQLVYDFTDETSEVSTTDKIADITIIIPYIGPALNIGNMLYKDDFVGALIFSGAVILLEFIPEIAIPVLGTFALVSYIANKVLTVQTIDNALSKRNEKWDEVYKYIVTNWLAKVNTQIDLIRKKMKEALENQAEATKAIINYQYNQYTEEEKNNINFNIDDLSSKLNESINKAMININKFLNQCSVSYLMNSMIPYGVKRLEDFDASLKDALLKYIYDNRGTLIGQVDRLKDKVNNTLSTDIPFQLSKYVDNQRLLSTLEGGGGSGGGGSGGGGSALVGSSFLSPEHQRVQQRKESKKPPAKLQPR

SEQ ID NO: 23 - protein, 916 aa, Artificial Sequence
  source: /note="Description of Artificial Sequence: Synthetic polypeptide"
TWPVKDFNYSDPVNDNDILYLRIPQNKLITTPVKAFMITQNIWVIPERFSSDTNPSLSKPPRPTSKYQSYYDPSYLSTDEQKDTFLKGIIKLFKRINERDIGKKLINYLVVGSPFMGDSSTPEDTFDFTRHTTNIAVEKFENGSWKVTNIITPSVLIFGPLPNILDYTASLTLQGQQSNPSFEGFGTLSILKVAPEFLLTFSDVTSNQSSAVLGKSIFCMDPVIALMHELTHSLHQLYGINIPSDKRIRPQVSEGFFSQDGPNVQFEELYTFGGLDVEIIPQIERSQLREKALGHYKDIAKRLNNINKTIPSSWISNIDKYKKIFSEKYNFDKDNTGNFVVNIDKFNSLYSDLTNVMSEVVYSSQYNVKNRTHYFSRHYLPVFANILDDNIYTIRDGFNLTNKGFNIENSGQNIERNPALQKLSSESVVDLFTKVCVDGIITSKTKSIEGRYADAIFTASYRNVLGQLSARKLLQDILSRALAGGGGSGGGGSGGGGSALALQCIKVKNNRLPYVADKDSISQEIFENKIITDETNVQNYSDKFSLDESILDGQVPINPEIVDPLLPNVNMEPLNLPGEEIVFYDDITKYVDYLNSYYYLESQKLSNNVENITLTTSVEEALGYSNKIYTFLPSLAEKVNKGVQAGLFLNWANEVVEDFTTNIMKKDTLDKISDVSVIIPYIGPALNIGNSALRGNFNQAFATAGVAFLLEGFPEFTIPALGVFTFYSSIQEREKIIKTIENCLEQRVKRWKDSYQWMVSNWLSRITTQFNHINYQMYDSLSYQADAIKAKIDLEYKKYSGSDKENIKSQVENLKNSLDVKISEAMNNINKFIRECSVTYLFKNMLPKVIDELNKFDLRTKTELINLIDSHNIILVGEVDRLKAKVNESFENTMPFNIFSYTNNSLLKDIINEYFN

SEQ ID NO: 24 - protein, 910 aa, Artificial Sequence
  source: /note="Description of Artificial Sequence: Synthetic polypeptide"
HVDAIFTQSYRKVLAQLSARKLLQDILNRNNNNNNNNNNTWPVKDFNYSDPVNDNDILYLRIPQNKLITTPVKAFMITQNIWVIPERFSSDTNPSLSKPPRPTSKYQSYYDPSYLSTDEQKDTFLKGIIKLFKRINERDIGKKLINYLVVGSPFMGDSSTPEDTFDFTRHTTNIAVEKFENGSWKVTNIITPSVLIFGPLPNILDYTASLTLQGQQSNPSFEGFGTLSILKVAPEFLLTFSDVTSNQSSAVLGKSIFCMDPVIALMHELTHSLHQLYGINIPSDKRIRPQVSEGFFSQDGPNVQFEELYTFGGLDVEIIPQIERSQLREKALGHYKDIAKRLNNINKTIPSSWISNIDKYKKIFSEKYNFDKDNTGNFVVNIDKFNSLYSDLTNVMSEVVYSSQYNVKNRTHYFSRHYLPVFANILDDNIYTIRDGFNLTNKGFNIENSGQNIERNPALQKLSSESVVDLFTKVCVDKSEEKLYDDDDKDRWGSSLQCIKVKNNRLPYVADKDSISQEIFENKIITDETNVQNYSDKFSLDESILDGQVPINPEIVDPLLPNVNMEPLNLPGEEIVFYDDITKYVDYLNSYYYLESQKLSNNVENITLTTSVEEALGYSNKIYTFLPSLAEKVNKGVQAGLFLNWANEVVEDFTTNIMKKDTLDKISDVSVIIPYIGPALNIGNSALRGNFNQAFATAGVAFLLEGFPEFTIPALGVFTFYSSIQEREKIIKTIENCLEQRVKRWKDSYQWMVSNWLSRITTQFNHINYQMYDSLSYQADAIKAKIDLEYKKYSGSDKENIKSQVENLKNSLDVKISEAMNNINKFIRECSVTYLFKNMLPKVIDELNKFDLRTKTELINLIDSHNIILVGEVDRLKAKVNESFENTMPFNIFSYTNNSLLKDIINEYFN

SEQ ID NO: 25 - protein, 714 aa, Artificial Sequence
  source: /note="Description of Artificial Sequence: Synthetic polypeptide"
ESNQPEKNGTATKPENSGNTTSENGQTEPEKKLELRNVSDIELYSQTNGTYRQHVSLDGIPENTDTYFVKVKSSAFKDVYIPVASITEEKRNGQSVYKITAKAEKLQQELENKYVDNFTFYLDKKAKEENTNFTSFSNLVKAINQNPSGTYHLAASLNANEVELGPDERSYIKDTFTGRLIGEKDGKNYAIYNLKKPLFENLSGATVEKLSLKNVAISGKNDIGSLANEATNGTKIKQVHVDGCVDGIITSKTKSDDDDKNKALNLQCIKIKNEDLTFIAEKNSFSEEPFQDEIVSYNTKNKPLNFNYSLDKIIVDYNLQSKITLPNDRTTPVTKGIPYAPEYKSNAASTIEIHNIDDNTIYQYLYAQKSPTTLQRITMTNSVDDALINSTKIYSYFPSVISKVNQGAQGILFLQWVRDIIDDFTNESSQKTTIDKISDVSTIVPYIGPALNIVKQGYEGNFIGALETTGVVLLLEYIPEITLPVIAALSIAESSTQKEKIIKTIDNFLEKRYEKWIEVYKLVKAKWLGTVNTQFQKRSYQMYRSLEYQVDAIKKIIDYEYKIYSGPDKEQIADEINNLKNKLEEKANKAMININIFMRESSRSFLVNQMINEAKKQLLEFDTQSKNILMQYIKANSKFIGITELKKLESKINKVFSTPIPFSYSKNLDCWVDNEEDIDVLEGGGGSGGGGSGGGGSALVAGCKNFFWKTFTSC

SEQ ID NO: 26 - protein, 728 aa, Artificial Sequence
  source: /note="Description of Artificial Sequence: Synthetic polypeptide"
ESNQPEKNGTATKPENSGNTTSENGQTEPEKKLELRNVSDIELYSQTNGTYRQHVSLDGIPENTDTYFVKVKSSAFKDVYIPVASITEEKRNGQSVYKITAKAEKLQQELENKYVDNFTFYLDKKAKEENTNFTSFSNLVKAINQNPSGTYHLAASLNANEVELGPDERSYIKDTFTGRLIGEKDGKNYAIYNLKKPLFENLSGATVEKLSLKNVAISGKNDIGSLANEATNGTKIKQVHVDGCVDGIITSKTKSDDDDKNKALNLQCIKIKNEDLTFIAEKNSFSEEPFQDEIVSYNTKNKPLNFNYSLDKIIVDYNLQSKITLPNDRTTPVTKGIPYAPEYKSNAASTIEIHNIDDNTIYQYLYAQKSPTTLQRITMTNSVDDALINSTKIYSYFPSVISKVNQGAQGILFLQWVRDIIDDFTNESSQKTTIDKISDVSTIVPYIGPALNIVKQGYEGNFIGALETTGVVLLLEYIPEITLPVIAALSIAESSTQKEKIIKTIDNFLEKRYEKWIEVYKLVKAKWLGTVNTQFQKRSYQMYRSLEYQVDAIKKIIDYEYKIYSGPDKEQIADEINNLKNKLEEKANKAMININIFMRESSRSFLVNQMINEAKKQLLEFDTQSKNILMQYIKANSKFIGITELKKLESKINKVFSTPIPFSYSKNLDCWVDNEEDIDVLEGGGGSGGGGSGGGGSALVGSSFLSPEHQRVQQRKESKKPPAKLQPR

SEQ ID NO: 27 - protein, 899 aa, Artificial Sequence
  source: /note="Description of Artificial Sequence: Synthetic polypeptide"
EFVNKQFNYKDPVNGVDIAYIKIPNAGQMQPVKAFKIHNKIWVIPERDTFTNPEEGDLNPPPEAKQVPVSYYDSTYLSTDNEKDNYLKGVTKLFERIYSTDLGRMLLTSIVRGIPFWGGSTIDTELKVIDTNCINVIQPDGSYRSEELNLVIIGPSADIIQFECKSFGHEVLNLTRNGYGSTQYIRFSPDFTFGFEESLEVDTNPLLGAGKFATDPAVTLAHELIHAGHRLYGIAINPNRVFKVNTNAYYEMSGLEVSFEELRTFGGHDAKFIDSLQENEFRLYYYNKFKDIASTLNKAKSIVGTTASLQYMKNVFKEKYLLSEDTSGKFSVDKLKFDKLYKMLTEIYTEDNFVKFFKVLNRKTYLNFDKAVFKINIVPKVNYTIYDGFNLRNTNLAANFNGQNTEINNMNFTKLKNFTGLFEFYKLLCVDGIITSKTKSDDDDKNKALNLQCIKVNNWDLFFSPSEDNFTNDLNKGEEITSDTNIEAAEENISLDLIQQYYLTFNFDNEPENISIENLSSDIIGQLELMPNIERFPNGKKYELDKYTMFHYLRAQEFEHGKSRIALTNSVNEALLNPSRVYTFFSSDYVKKVNKATEAAMFLGWVEQLVYDFTDETSEVSTTDKIADITIIIPYIGPALNIGNMLYKDDFVGALIFSGAVILLEFIPEIAIPVLGTFALVSYIANKVLTVQTIDNALSKRNEKWDEVYKYIVTNWLAKVNTQIDLIRKKMKEALENQAEATKAIINYQYNQYTEEEKNNINFNIDDLSSKLNESINKAMININKFLNQCSVSYLMNSMIPYGVKRLEDFDASLKDALLKYIYDNRGTLIGQVDRLKDKVNNTLSTDIPFQLSKYVDNQRLLSTLEIYALVGSWFLSPEHQRVQQRKESKKPPAKLQPR

SEQ ID NO: 28 - protein, 929 aa, Artificial Sequence
  source: /note="Description of Artificial Sequence: Synthetic polypeptide"
TWPVKDFNYSDPVNDNDILYLRIPQNKLITTPVKAFMITQNIWVIPERFSSDTNPSLSKPPRPTSKYQSYYDPSYLSTDEQKDTFLKGIIKLFKRINERDIGKKLINYLVVGSPFMGDSSTPEDTFDFTRHTTNIAVEKFENGSWKVTNIITPSVLIFGPLPNILDYTASLTLQGQQSNPSFEGFGTLSILKVAPEFLLTFSDVTSNQSSAVLGKSIFCMDPVIALMHELTHSLHQLYGINIPSDKRIRPQVSEGFFSQDGPNVQFEELYTFGGLDVEIIPQIERSQLREKALGHYKDIAKRLNNINKTIPSSWISNIDKYKKIFSEKYNFDKDNTGNFVVNIDKFNSLYSDLTNVMSEVVYSSQYNVKNRTHYFSRHYLPVFANILDDNIYTIRDGFNLTNKGFNIENSGQNIERNPALQKLSSESVVDLFTKVCVDKSEEKLYDDDDKDRWGSSLQCIKVKNNRLPYVADKDSISQEIFENKIITDETNVQNYSDKFSLDESILDGQVPINPEIVDPLLPNVNMEPLNLPGEEIVFYDDITKYVDYLNSYYYLESQKLSNNVENITLTTSVEEALGYSNKIYTFLPSLAEKVNKGVQAGLFLNWANEVVEDFTTNIMKKDTLDKISDVSVIIPYIGPALNIGNSALRGNFNQAFATAGVAFLLEGFPEFTIPALGVFTFYSSIQEREKIIKTIENCLEQRVKRWKDSYQWMVSNWLSRITTQFNHINYQMYDSLSYQADAIKAKIDLEYKKYSGSDKENIKSQVENLKNSLDVKISEAMNNINKFIRECSVTYLFKNMLPKVIDELNKFDLRTKTELINLIDSHNIILVGEVDRLKAKVNESFENTMPFNIFSYTNNSLLKDIINEYFNLEGGGGSGGGGSGGGGSGGGGSGGGGSALVSANSNPAMAPRERKAGCKNFFWKTFTSC

SEQ ID NO: 29 - protein, 901 aa, Artificial Sequence
  source: /note="Description of Artificial Sequence: Synthetic polypeptide"
TWPVKDFNYSDPVNDNDILYLRIPQNKLITTPVKAFMITQNIWVIPERFSSDTNPSLSKPPRPTSKYQSYYDPSYLSTDEQKDTFLKGIIKLFKRINERDIGKKLINYLVVGSPFMGDSSTPEDTFDFTRHTTNIAVEKFENGSWKVTNIITPSVLIFGPLPNILDYTASLTLQGQQSNPSFEGFGTLSILKVAPEFLLTFSDVTSNQSSAVLGKSIFCMDPVIALMHELTHSLHQLYGINIPSDKRIRPQVSEGFFSQDGPNVQFEELYTFGGLDVEIIPQIERSQLREKALGHYKDIAKRLNNINKTIPSSWISNIDKYKKIFSEKYNFDKDNTGNFVVNIDKFNSLYSDLTNVMSEVVYSSQYNVKNRTHYFSRHYLPVFANILDDNIYTIRDGFNLTNKGFNIENSGQNIERNPALQKLSSESVVDLFTKVCVDKSEEKLYDDDDKDRWGSSLQCIKVKNNRLPYVADKDSISQEIFENKIITDETNVQNYSDKFSLDESILDGQVPINPEIVDPLLPNVNMEPLNLPGEEIVFYDDITKYVDYLNSYYYLESQKLSNNVENITLTTSVEEALGYSNKIYTFLPSLAEKVNKGVQAGLFLNWANEVVEDFTTNIMKKDTLDKISDVSVIIPYIGPALNIGNSALRGNFNQAFATAGVAFLLEGFPEFTIPALGVFTFYSSIQEREKIIKTIENCLEQRVKRWKDSYQWMVSNWLSRITTQFNHINYQMYDSLSYQADAIKAKIDLEYKKYSGSDKENIKSQVENLKNSLDVKISEAMNNINKFIRECSVTYLFKNMLPKVIDELNKFDLRTKTELINLIDSHNIILVGEVDRLKAKVNESFENTMPFNIFSYTNNSLLKDIINEYFNLEGGGGSGGGGSGGGGSALVGNHWAVGHLM

SEQ ID NO: 30 - protein, 899 aa, Artificial Sequence
  source: /note="Description of Artificial Sequence: Synthetic polypeptide"
PVTINNFNYNDPIDNNNIIMMEPPFARGTGRYYKAFKITDRIWIIPERYTFGYKPEDFNKSSGIFNRDVCEYYDPDYLNTNDKKNIFLQTMIKLFNRIKSKPLGEKLLEMIINGIPYLGDRRVPLEEFNTNIASVTVNKLISNPGEVERKKGIFANLIIFGPGPVLNENETIDIGIQNHFASREGFGGIMQMKFCPEYVSVFNNVQENKGASIFNRRGYFSDPALILMHELIHVLHGLYGIKVDDLPIVPNEKKFFMQSTDAIQAEELYTFGGQDPSIITPSTDKSIYDKVLQNFRGIVDRLNKVLVCISDPNININIYKNKFKDKYKFVEDSEGKYSIDVESFDKLYKSLMFGFTETNIAENYKIKTRASYFSDSLPPVKIKNLLDNEIYTIEEGFNISDKDMEKEYRGQNKAINKQAYEEISKEHLAVYKIQMCVDEEKLYDDDDKDRWGSSLQCIDVDNEDLFFIADKNSFSDDLSKNERIEYNTQSNYIENDFPINELILDTDLISKIELPSENTESLTDFNVDVPVYEKQPAIKKIFTDENTIFQYLYSQTFPLDIRDISLTSSFDDALLFSNKVYSFFSMDYIKTANKVVEAGLFAGWVKQIVNDFVIEANKSNTMDAIADISLIVPYIGLALNVGNETAKGNFENAFEIAGASILLEFIPELLIPVVGAFLLESYIDNKNKIIKTIDNALTKRNEKWSDMYGLIVAQWLSTVNTQFYTIKEGMYKALNYQAQALEEIIKYRYNIYSEKEKSNINIDFNDINSKLNEGINQAIDNINNFINGCSVSYLMKKMIPLAVEKLLDFDNTLKKNLLNYIDENKLYLIGSAEYEKSKVNKYLKTIMPFDLSIYTNDTILIEMFNKYNSLEGGGGSGGGGSGGGGSALVGNHWAVGHLM

SEQ ID NO: 31 - DNA, 205 bp, Artificial Sequence
  source: /note="Description of Artificial Sequence: Synthetic polynucleotide"
ggatccgtcgacaacaacaataacaacaacaataacaacaacgacgatgacgataaacatgtggatgcgatctttacccagagctatcggaaggttttggcccaactgtctgctcgtaaacttttacaggacattctgaacagagcagaagcggcagccaaagaagcagccgctaaggcgctgcagagtctagaataataagctt

SEQ ID NO: 32 - DNA, 2754 bp, Artificial Sequence
  source: /note="Description of Artificial Sequence: Synthetic polynucleotide"
ggatccatgacgtggccagttaaggatttcaactactcagatcctgtaaatgacaacgatattctgtaccttcgcattccacaaaataaactgatcaccacaccagtcaaagcattcatgattactcaaaacatttgggtcattccagaacgcttttctagtgacacaaatccgagtttatctaaacctccgcgtccgacgtccaaatatcagagctattacgatccctcatatctcagtacggacgaacaaaaagatactttccttaaaggtatcattaaactgtttaagcgtattaatgagcgcgatatcgggaaaaagttgattaattatcttgttgtgggttccccgttcatgggcgatagctctacccccgaagacacttttgattttacccgtcatacgacaaacatcgcggtagagaagtttgagaacggatcgtggaaagtcacaaacatcattacacctagcgtcttaatttttggtccgctgccaaacatcttagattatacagccagcctgactttgcaggggcaacagtcgaatccgagtttcgaaggttttggtaccctgagcattctgaaagttgccccggaatttctgctcactttttcagatgtcaccagcaaccagagctcagcagtattaggaaagtcaattttttgcatggacccggttattgcactgatgcacgaactgacgcactctctgcatcaactgtatgggatcaacatccccagtgacaaacgtattcgtccccaggtgtctgaaggatttttctcacaggatgggccgaacgtccagttcgaagagttgtatactttcggaggcctggacgtagagatcattccccagattgagcgcagtcagctgcgtgagaaggcattgggccattataaggatattgcaaaacgcctgaataacattaacaaaacgattccatcttcgtggatctcgaatattgataaatataagaaaatttttagcgagaaatataattttgataaagataatacaggtaactttgtggttaacattgacaaattcaactccctttacagtgatttgacgaatgtaatgagcgaagttgtgtatagttcccaatacaacgttaagaatcgtacccattacttctctcgtcactacctgccggttttcgcgaacatccttgacgataatatttacactattcgtgacggctttaacttgaccaacaagggcttcaatattgaaaattcaggccagaacattgaacgcaacccggccttgcagaaactgtcgagtgaatccgtggttgacctgtttaccaaagtctgcgtcgacaacaacaataacaacaacaataacaacaacgacgatgacgataaacatgtggatgcgatctttacccagagctatcggaaggttttggcccaactgtctgctcgtaaacttttacaggacattctgaacagagcagaagcggcagccaaagaagcagccgctaaggcgctgcagtgtattaaagtgaaaaacaatcggctgccttatgtagcagataaagatagcattagtcaggagattttcgaaaataaaattatcactgacgaaaccaatgttcagaattattcagataaattttcactggacgaaagcatcttagatggccaagttccgattaacccggaaattgttgatccgttactgccgaacgtgaatatggaaccgttaaacctccctggcgaagagatcgtattttatgatgacattacgaaatatgtggactaccttaattcttattactatttggaaagccagaaactgtccaataacgtggaaaacattactctgaccacaagcgtggaagaggctttaggctactcaaataagatttataccttcctcccgtcgctggcggaaaaagtaaataaaggtgtgcaggctggtctgttcctcaactgggcgaatgaagttgtcgaagactttaccacgaatattatgaaaaaggataccctggataaaatctccgacgtctcggttattatcccatatattggccctgcgttaaatatcggtaatagtgcgctgcgggggaattttaaccaggcctttgctaccgcgggcgtcgcgttcctcctggagggctttcctgaatttactatcccggcgctcggtgtttttacattttactcttccatccaggagcgtgagaaaattatcaaaaccatcgaaaactgcctggagcagcgggtgaaacgctggaaagattcttatcaatggatggtgtcaaactggttatctcgcatcacgacccaattcaaccatattaattaccagatgtatgatagtctgtcgtaccaagctgacgccattaaagccaaaattgatctggaatataaaaagtactctggtagcgataaggagaacatcaaaagccaggtggagaaccttaagaatagtctggatgtgaaaatctctgaagctatgaataacattaacaaattcattcgtgaatgttcggtgacgtacctgttcaagaatatgctgccaaaagttattgatgaactgaataaatttgatctgcgtaccaaaaccgaacttatcaacctcatcgactcccacaacattatccttgtgggcgaagtggatcgtctgaaggccaaagtaaacgagagctttgaaaatacgatgccgtttaatattttttcatataccaataactccttgctgaaagatatcatcaatgaatatttcaatctagaataatgaaagctt

SEQ ID NO: 33 - protein, 909 aa, Artificial Sequence
  source: /note="Description of Artificial Sequence: Synthetic polypeptide"
TWPVKDFNYSDPVNDNDILYLRIPQNKLITTPVKAFMITQNIWVIPERFSSDTNPSLSKPPRPTSKYQSYYDPSYLSTDEQKDTFLKGIIKLFKRINERDIGKKLINYLVVGSPFMGDSSTPEDTFDFTRHTTNIAVEKFENGSWKVTNIITPSVLIFGPLPNILDYTASLTLQGQQSNPSFEGFGTLSILKVAPEFLLTFSDVTSNQSSAVLGKSIFCMDPVIALMHELTHSLHQLYGINIPSDKRIRPQVSEGFFSQDGPNVQFEELYTFGGLDVEIIPQIERSQLREKALGHYKDIAKRLNNINKTIPSSWISNIDKYKKIFSEKYNFDKDNTGNFVVNIDKFNSLYSDLTNVMSEVVYSSQYNVKNRTHYFSRHYLPVFANILDDNIYTIRDGFNLTNKGFNIENSGQNIERNPALQKLSSESVVDLFTKVCVDNNNNNNNNNNDDDDKHVDAIFTQSYRKVLAQLSARKLLQDILNRAEAAAKEAAAKALQCIKVKNNRLPYVADKDSISQEIFENKIITDETNVQNYSDKFSLDESILDGQVPINPEIVDPLLPNVNMEPLNLPGEEIVFYDDITKYVDYLNSYYYLESQKLSNNVENITLTTSVEEALGYSNKIYTFLPSLAEKVNKGVQAGLFLNWANEVVEDFTTNIMKKDTLDKISDVSVIIPYIGPALNIGNSALRGNFNQAFATAGVAFLLEGFPEFTIPALGVFTFYSSIQEREKIIKTIENCLEQRVKRWKDSYQWMVSNWLSRITTQFNHINYQMYDSLSYQADAIKAKIDLEYKKYSGSDKENIKSQVENLKNSLDVKISEAMNNINKFIRECSVTYLFKNMLPKVIDELNKFDLRTKTELINLIDSHNIILVGEVDRLKAKVNESFENTMPFNIFSYTNNSLLKDIINEYFN

SEQ ID NO: 34 - protein, 919 aa, Artificial Sequence
  source: /note="Description of Artificial Sequence: Synthetic polypeptide"
EFVNKQFNYKDPVNGVDIAYIKIPNAGQMQPVKAFKIHNKIWVIPERDTFTNPEEGDLNPPPEAKQVPVSYYDSTYLSTDNEKDNYLKGVTKLFERIYSTDLGRMLLTSIVRGIPFWGGSTIDTELKVIDTNCINVIQPDGSYRSEELNLVIIGPSADIIQFECKSFGHEVLNLTRNGYGSTQYIRFSPDFTFGFEESLEVDTNPLLGAGKFATDPAVTLAHELIHAGHRLYGIAINPNRVFKVNTNAYYEMSGLEVSFEELRTFGGHDAKFIDSLQENEFRLYYYNKFKDIASTLNKAKSIVGTTASLQYMKNVFKEKYLLSEDTSGKFSVDKLKFDKLYKMLTEIYTEDNFVKFFKVLNRKTYLNFDKAVFKINIVPKVNYTIYDGFNLRNTNLAANFNGQNTEINNMNFTKLKNFTGLFEFYKLLCVDGIITSKTKSLIEGRHVDAIFTQSYRKVLAQLSARKLLQDILNRQQGERNQEQGALAGGGGSGGGGSGGGGSALVLQCIKVNNWDLFFSPSEDNFTNDLNKGEEITSDTNIEAAEENISLDLIQQYYLTFNFDNEPENISIENLSSDIIGQLELMPNIERFPNGKKYELDKYTMFHYLRAQEFEHGKSRIALTNSVNEALLNPSRVYTFFSSDYVKKVNKATEAAMFLGWVEQLVYDFTDETSEVSTTDKIADITIIIPYIGPALNIGNMLYKDDFVGALIFSGAVILLEFIPEIAIPVLGTFALVSYIANKVLTVQTIDNALSKRNEKWDEVYKYIVTNWLAKVNTQIDLIRKKMKEALENQAEATKAIINYQYNQYTEEEKNNINFNIDDLSSKLNESINKAMININKFLNQCSVSYLMNSMIPYGVKRLEDFDASLKDALLKYIYDNRGTLIGQVDRLKDKVNNTLSTDIPFQLSKYVDNQRLLST

SEQ ID NO: 35 - protein, 919 aa, Artificial Sequence
  source: /note="Description of Artificial Sequence: Synthetic polypeptide"
PITINNFNYSDPVDNKNILYLDTHLNTLANEPEKAFRITGNIWVIPDRFSRNSNPNLNKPPRVTSPKSGYYDPNYLSTDSDKDTFLKEIIKLFKRINSREIGEELIYRLSTDIPFPGNNNTPINTFDFDVDFNSVDVKTRQGNNWVKTGSINPSVIITGPRENIIDPETSTFKLTNNTFAAQEGFGALSIISISPRFMLTYSNATNDVGEGRFSKSEFCMDPILILMHELNHAMHNLYGIAIPNDQTISSVTSNIFYSQYNVKLEYAEIYAFGGPTIDLIPKSARKYFEEKALDYYRSIAKRLNSITTANPSSFNKYIGEYKQKLIRKYRFVVESSGEVTVNRNKFVELYNELTQIFTEFNYAKIYNVQNRKIYLSNVYTPVTANILDDNVYDIQNGFNIPKSNLNVLFMGQNLSRNPALRKVNPENMLYLFTKFCVDAIDGRHVDAIFTQSYRKVLAQLSARKLLQDILNRQQGERNQEQGALAGGGGSGGGGSGGGGSALVLQCRELLVKNTDLPFIGDISDVKTDIFLRKDINEETEVIYYPDNVSVDQVILSKNTSEHGQLDLLYPSIDSESEILPGENQVFYDNRTQNVDYLNSYYYLESQKLSDNVEDFTFTRSIEEALDNSAKVYTYFPTLANKVNAGVQGGLFLMWANDVVEDFTTNILRKDTLDKISDVSAIIPYIGPALNISNSVRRGNFTEAFAVTGVTILLEAFPEFTIPALGAFVIYSKVQERNEIIKTIDNCLEQRIKRWKDSYEWMMGTWLSRIITQFNNISYQMYDSLNYQAGAIKAKIDLEYKKYSGSDKENIKSQVENLKNSLDVKISEAMNNINKFIRECSVTYLFKNMLPKVIDELNEFDRNTKAKLINLIDSHNIILVGEVDKLKAKVNNSFQNTIPFNIFSYTNNSLLKDIINEYFN

SEQ ID NO: 36 - protein, 928 aa, Artificial Sequence
  source: /note="Description of Artificial Sequence: Synthetic polypeptide"
TWPVKDFNYSDPVNDNDILYLRIPQNKLITTPVKAFMITQNIWVIPERFSSDTNPSLSKPPRPTSKYQSYYDPSYLSTDEQKDTFLKGIIKLFKRINERDIGKKLINYLVVGSPFMGDSSTPEDTFDFTRHTTNIAVEKFENGSWKVTNIITPSVLIFGPLPNILDYTASLTLQGQQSNPSFEGFGTLSILKVAPEFLLTFSDVTSNQSSAVLGKSIFCMDPVIALMHELTHSLHQLYGINIPSDKRIRPQVSEGFFSQDGPNVQFEELYTFGGLDVEIIPQIERSQLREKALGHYKDIAKRLNNINKTIPSSWISNIDKYKKIFSEKYNFDKDNTGNFVVNIDKFNSLYSDLTNVMSEVVYSSQYNVKNRTHYFSRHYLPVFANILDDNIYTIRDGFNLTNKGFNIENSGQNIERNPALQKLSSESVVDLFTKVCVDGIITSKTKSDDDDKHVDAIFTQSYRKVLAQLSARKLLQDILNRQQGERNQEQGAALAGGGGSGGGGSGGGGSALALQCIKVKNNRLPYVADKDSISQEIFENKIITDETNVQNYSDKFSLDESILDGQVPINPEIVDPLLPNVNMEPLNLPGEEIVFYDDITKYVDYLNSYYYLESQKLSNNVENITLTTSVEEALGYSNKIYTFLPSLAEKVNKGVQAGLFLNWANEVVEDFTTNIMKKDTLDKISDVSVIIPYIGPALNIGNSALRGNFNQAFATAGVAFLLEGFPEFTIPALGVFTFYSSIQEREKIIKTIENCLEQRVKRWKDSYQWMVSNWLSRITTQFNHINYQMYDSLSYQADAIKAKIDLEYKKYSGSDKENIKSQVENLKNSLDVKISEAMNNINKFIRECSVTYLFKNMLPKVIDELNKFDLRTKTELINLIDSHNIILVGEVDRLKAKVNESFENTMPFNIFSYTNNSLLKDIINEYFN

SEQ ID NO: 37 - protein, 913 aa, Artificial Sequence
  source: /note="Description of Artificial Sequence: Synthetic polypeptide"
TWPVKDFNYSDPVNDNDILYLRIPQNKLITTPVKAFMITQNIWVIPERFSSDTNPSLSKPPRPTSKYQSYYDPSYLSTDEQKDTFLKGIIKLFKRINERDIGKKLINYLVVGSPFMGDSSTPEDTFDFTRHTTNIAVEKFENGSWKVTNIITPSVLIFGPLPNILDYTASLTLQGQQSNPSFEGFGTLSILKVAPEFLLTFSDVTSNQSSAVLGKSIFCMDPVIALMHELTHSLHQLYGINIPSDKRIRPQVSEGFFSQDGPNVQFEELYTFGGLDVEIIPQIERSQLREKALGHYKDIAKRLNNINKTIPSSWISNIDKYKKIFSEKYNFDKDNTGNFVVNIDKFNSLYSDLTNVMSEVVYSSQYNVKNRTHYFSRHYLPVFANILDDNIYTIRDGFNLTNKGFNIENSGQNIERNPALQKLSSESVVDLFTKVCVDNNNNNNNNNNDDDDKHVDAIFTQSYRKVLAQLSARKLLQDILNRQQGERNQEQGAPAPAPLQCIKVKNNRLPYVADKDSISQEIFENKIITDETNVQNYSDKFSLDESILDGQVPINPEIVDPLLPNVNMEPLNLPGEEIVFYDDITKYVDYLNSYYYLESQKLSNNVENITLTTSVEEALGYSNKIYTFLPSLAEKVNKGVQAGLFLNWANEVVEDFTTNIMKKDTLDKISDVSVIIPYIGPALNIGNSALRGNFNQAFATAGVAFLLEGFPEFTIPALGVFTFYSSIQEREKIIKTIENCLEQRVKRWKDSYQWMVSNWLSRITTQFNHINYQMYDSLSYQADAIKAKIDLEYKKYSGSDKENIKSQVENLKNSLDVKISEAMNNINKFIRECSVTYLFKNMLPKVIDELNKFDLRTKTELINLIDSHNIILVGEVDRLKAKVNESFENTMPFNIFSYTNNSLLKDIINEYFN

SEQ ID NO: 38 - protein, 919 aa, Artificial Sequence
  source: /note="Description of Artificial Sequence: Synthetic polypeptide"
TWPVKDFNYSDPVNDNDILYLRIPQNKLITTPVKAFMITQNIWVIPERFSSDTNPSLSKPPRPTSKYQSYYDPSYLSTDEQKDTFLKGIIKLFKRINERDIGKKLINYLVVGSPFMGDSSTPEDTFDFTRHTTNIAVEKFENGSWKVTNIITPSVLIFGPLPNILDYTASLTLQGQQSNPSFEGFGTLSILKVAPEFLLTFSDVTSNQSSAVLGKSIFCMDPVIALMHELTHSLHQLYGINIPSDKRIRPQVSEGFFSQDGPNVQFEELYTFGGLDVEIIPQIERSQLREKALGHYKDIAKRLNNINKTIPSSWISNIDKYKKIFSEKYNFDKDNTGNFVVNIDKFNSLYSDLTNVMSEVVYSSQYNVKNRTHYFSRHYLPVFANILDDNIYTIRDGFNLTNKGFNIENSGQNIERNPALQKLSSESVVDLFTKVCVDNNNNNNNNNNDDDDKHVDAIFTQSYRKVLAQLSARKLLQDILNRQQGERNQEQGAEAAAKEAAAKALQCIKVKNNRLPYVADKDSISQEIFENKIITDETNVQNYSDKFSLDESILDGQVPINPEIVDPLLPNVNMEPLNLPGEEIVFYDDITKYVDYLNSYYYLESQKLSNNVENITLTTSVEEALGYSNKIYTFLPSLAEKVNKGVQAGLFLNWANEVVEDFTTNIMKKDTLDKISDVSVIIPYIGPALNIGNSALRGNFNQAFATAGVAFLLEGFPEFTIPALGVFTFYSSIQEREKIIKTIENCLEQRVKRWKDSYQWMVSNWLSRITTQFNHINYQMYDSLSYQADAIKAKIDLEYKKYSGSDKENIKSQVENLKNSLDVKISEAMNNINKFIRECSVTYLFKNMLPKVIDELNKFDLRTKTELINLIDSHNIILVGEVDRLKAKVNESFENTMPFNIFSYTNNSLLKDIINEYFN

SEQ ID NO: 39 - protein, 916 aa, Artificial Sequence
  source: /note="Description of Artificial Sequence: Synthetic polypeptide"
TWPVKDFNYSDPVNDNDILYLRIPQNKLITTPVKAFMITQNIWVIPERFSSDTNPSLSKPPRPTSKYQSYYDPSYLSTDEQKDTFLKGIIKLFKRINERDIGKKLINYLVVGSPFMGDSSTPEDTFDFTRHTTNIAVEKFENGSWKVTNIITPSVLIFGPLPNILDYTASLTLQGQQSNPSFEGFGTLSILKVAPEFLLTFSDVTSNQSSAVLGKSIFCMDPVIALMHELTHSLHQLYGINIPSDKRIRPQVSEGFFSQDGPNVQFEELYTFGGLDVEIIPQIERSQLREKALGHYKDIAKRLNNINKTIPSSWISNIDKYKKIFSEKYNFDKDNTGNFVVNIDKFNSLYSDLTNVMSEVVYSSQYNVKNRTHYFSRHYLPVFANILDDNIYTIRDGFNLTNKGFNIENSGQNIERNPALQKLSSESVVDLFTKVCVDGIITSKTKSDDDDKSANSNPAMAPRERKAGCKNFFWKTFTSCALAGGGGSGGGGSGGGGSALALQCIKVKNNRLPYVADKDSISQEIFENKIITDETNVQNYSDKFSLDESILDGQVPINPEIVDPLLPNVNMEPLNLPGEEIVFYDDITKYVDYLNSYYYLESQKLSNNVENITLTTSVEEALGYSNKIYTFLPSLAEKVNKGVQAGLFLNWANEVVEDFTTNIMKKDTLDKISDVSVIIPYIGPALNIGNSALRGNFNQAFATAGVAFLLEGFPEFTIPALGVFTFYSSIQEREKIIKTIENCLEQRVKRWKDSYQWMVSNWLSRITTQFNHINYQMYDSLSYQADAIKAKIDLEYKKYSGSDKENIKSQVENLKNSLDVKISEAMNNINKFIRECSVTYLFKNMLPKVIDELNKFDLRTKTELINLIDSHNIILVGEVDRLKAKVNESFENTMPFNIFSYTNNSLLKDIINEYFN

SEQ ID NO: 40 - protein, 902 aa, Artificial Sequence
  source: /note="Description of Artificial Sequence: Synthetic polypeptide"
TWPVKDFNYSDPVNDNDILYLRIPQNKLITTPVKAFMITQNIWVIPERFSSDTNPSLSKPPRPTSKYQSYYDPSYLSTDEQKDTFLKGIIKLFKRINERDIGKKLINYLVVGSPFMGDSSTPEDTFDFTRHTTNIAVEKFENGSWKVTNIITPSVLIFGPLPNILDYTASLTLQGQQSNPSFEGFGTLSILKVAPEFLLTFSDVTSNQSSAVLGKSIFCMDPVIALMHELTHSLHQLYGINIPSDKRIRPQVSEGFFSQDGPNVQFEELYTFGGLDVEIIPQIERSQLREKALGHYKDIAKRLNNINKTIPSSWISNIDKYKKIFSEKYNFDKDNTGNFVVNIDKFNSLYSDLTNVMSEVVYSSQYNVKNRTHYFSRHYLPVFANILDDNIYTIRDGFNLTNKGFNIENSGQNIERNPALQKLSSESVVDLFTKVCVDGIITSKTKSDDDDKAGCKNFFWKTFTSCALAGGGGSGGGGSGGGGSALALQCIKVKNNRLPYVADKDSISQEIFENKIITDETNVQNYSDKFSLDESILDGQVPINPEIVDPLLPNVNMEPLNLPGEEIVFYDDITKYVDYLNSYYYLESQKLSNNVENITLTTSVEEALGYSNKIYTFLPSLAEKVNKGVQAGLFLNWANEVVEDFTTNIMKKDTLDKISDVSVIIPYIGPALNIGNSALRGNFNQAFATAGVAFLLEGFPEFTIPALGVFTFYSSIQEREKIIKTIENCLEQRVKRWKDSYQWMVSNWLSRITTQFNHINYQMYDSLSYQADAIKAKIDLEYKKYSGSDKENIKSQVENLKNSLDVKISEAMNNINKFIRECSVTYLFKNMLPKVIDELNKFDLRTKTELINLIDSHNIILVGEVDRLKAKVNESFENTMPFNIFSYTNNSLLKDIINEYFN

SEQ ID NO: 41 - protein, 710 aa, Artificial Sequence
  source: /note="Description of Artificial Sequence: Synthetic polypeptide"
ESNQPEKNGTATKPENSGNTTSENGQTEPEKKLELRNVSDIELYSQTNGTYRQHVSLDGIPENTDTYFVKVKSSAFKDVYIPVASITEEKRNGQSVYKITAKAEKLQQELENKYVDNFTFYLDKKAKEENTNFTSFSNLVKAINQNPSGTYHLAASLNANEVELGPDERSYIKDTFTGRLIGEKDGKNYAIYNLKKPLFENLSGATVEKLSLKNVAISGKNDIGSLANEATNGTKIKQVHVDGCVDGIITSKTKSDDDDKAGCKNFFWKTFTSCALAGGGGSGGGGSGGGGSALALQCIKIKNEDLTFIAEKNSFSEEPFQDEIVSYNTKNKPLNFNYSLDKIIVDYNLQSKITLPNDRTTPVTKGIPYAPEYKSNAASTIEIHNIDDNTIYQYLYAQKSPTTLQRITMTNSVDDALINSTKIYSYFPSVISKVNQGAQGILFLQWVRDIIDDFTNESSQKTTIDKISDVSTIVPYIGPALNIVKQGYEGNFIGALETTGVVLLLEYIPEITLPVIAALSIAESSTQKEKIIKTIDNFLEKRYEKWIEVYKLVKAKWLGTVNTQFQKRSYQMYRSLEYQVDAIKKIIDYEYKIYSGPDKEQIADEINNLKNKLEEKANKAMININIFMRESSRSFLVNQMINEAKKQLLEFDTQSKNILMQYIKANSKFIGITELKKLESKINKVFSTPIPFSYSKNLDCWVDNEEDIDV

SEQ ID NO: 42 - protein, 918 aa, Artificial Sequence
  source: /note="Description of Artificial Sequence: Synthetic polypeptide"
EFVNKQFNYKDPVNGVDIAYIKIPNAGQMQPVKAFKIHNKIWVIPERDTFTNPEEGDLNPPPEAKQVPVSYYDSTYLSTDNEKDNYLKGVTKLFERIYSTDLGRMLLTSIVRGIPFWGGSTIDTELKVIDTNCINVIQPDGSYRSEELNLVIIGPSADIIQFECKSFGHEVLNLTRNGYGSTQYIRFSPDFTFGFEESLEVDTNPLLGAGKFATDPAVTLAHELIHAGHRLYGIAINPNRVFKVNTNAYYEMSGLEVSFEELRTFGGHDAKFIDSLQENEFRLYYYNKFKDIASTLNKAKSIVGTTASLQYMKNVFKEKYLLSEDTSGKFSVDKLKFDKLYKMLTEIYTEDNFVKFFKVLNRKTYLNFDKAVFKINIVPKVNYTIYDGFNLRNTNLAANFNGQNTEINNMNFTKLKNFTGLFEFYKLLCVDGGGGSADDDDKNDDPPISIDLTFHLLRNMIEMARIENEREQAGLNRKYLDEVALAGGGGSGGGGSGGGGSALVLQCIKVNNWDLFFSPSEDNFTNDLNKGEEITSDTNIEAAEENISLDLIQQYYLTFNFDNEPENISIENLSSDIIGQLELMPNIERFPNGKKYELDKYTMFHYLRAQEFEHGKSRIALTNSVNEALLNPSRVYTFFSSDYVKKVNKATEAAMFLGWVEQLVYDFTDETSEVSTTDKIADITIIIPYIGPALNIGNMLYKDDFVGALIFSGAVILLEFIPEIAIPVLGTFALVSYIANKVLTVQTIDNALSKRNEKWDEVYKYIVTNWLAKVNTQIDLIRKKMKEALENQAEATKAIINYQYNQYTEEEKNNINFNIDDLSSKLNESINKAMININKFLNQCSVSYLMNSMIPYGVKRLEDFDASLKDALLKYIYDNRGTLIGQVDRLKDKVNNTLSTDIPFQLSKYVDNQRLLST

SEQ ID NO: 43 - protein, 926 aa, Artificial Sequence
  source: /note="Description of Artificial Sequence: Synthetic polypeptide"
PVTINNFNYNDPIDNNNIIMMEPPFARGTGRYYKAFKITDRIWIIPERYTFGYKPEDFNKSSGIFNRDVCEYYDPDYLNTNDKKNIFLQTMIKLFNRIKSKPLGEKLLEMIINGIPYLGDRRVPLEEFNTNIASVTVNKLISNPGEVERKKGIFANLIIFGPGPVLNENETIDIGIQNHFASREGFGGIMQMKFCPEYVSVFNNVQENKGASIFNRRGYFSDPALILMHELIHVLHGLYGIKVDDLPIVPNEKKFFMQSTDAIQAEELYTFGGQDPSIITPSTDKSIYDKVLQNFRGIVDRLNKVLVCISDPNININIYKNKFKDKYKFVEDSEGKYSIDVESFDKLYKSLMFGFTETNIAENYKIKTRASYFSDSLPPVKIKNLLDNEIYTIEEGFNISDKDMEKEYRGQNKAINKQAYEEISKEHLAVYKIQMCVDGGGGSGGGGSADDDDKVVSHFNDCPDSHTQFCFHGTCRFLVQEDKPACVCHSGYVGARCEHADLLAALAKRLVLQCIDVDNEDLFFIADKNSFSDDLSKNERIEYNTQSNYIENDFPINELILDTDLISKIELPSENTESLTDFNVDVPVYEKQPAIKKIFTDENTIFQYLYSQTFPLDIRDISLTSSFDDALLFSNKVYSFFSMDYIKTANKVVEAGLFAGWVKQIVNDFVIEANKSNTMDAIADISLIVPYIGLALNVGNETAKGNFENAFEIAGASILLEFIPELLIPVVGAFLLESYIDNKNKIIKTIDNALTKRNEKWSDMYGLIVAQWLSTVNTQFYTIKEGMYKALNYQAQALEEIIKYRYNIYSEKEKSNINIDFNDINSKLNEGINQAIDNINNFINGCSVSYLMKKMIPLAVEKLLDFDNTLKKNLLNYIDENKLYLIGSAEYEKSKVNKYLKTIMPFDLSIYTNDTILIEMFNKYNS

SEQ ID NO: 44 - protein, 940 aa, Artificial Sequence
  source: /note="Description of Artificial Sequence: Synthetic polypeptide"
PVTINNFNYNDPIDNNNIIMMEPPFARGTGRYYKAFKITDRIWIIPERYTFGYKPEDFNKSSGIFNRDVCEYYDPDYLNTNDKKNIFLQTMIKLFNRIKSKPLGEKLLEMIINGIPYLGDRRVPLEEFNTNIASVTVNKLISNPGEVERKKGIFANLIIFGPGPVLNENETIDIGIQNHFASREGFGGIMQMKFCPEYVSVFNNVQENKGASIFNRRGYFSDPALILMHELIHVLHGLYGIKVDDLPIVPNEKKFFMQSTDAIQAEELYTFGGQDPSIITPSTDKSIYDKVLQNFRGIVDRLNKVLVCISDPNININIYKNKFKDKYKFVEDSEGKYSIDVESFDKLYKSLMFGFTETNIAENYKIKTRASYFSDSLPPVKIKNLLDNEIYTIEEGFNISDKDMEKEYRGQNKAINKQAYEEISKEHLAVYKIQMCVDGGGGSGGGGSADDDDKVVSHFNDCPDSHTQFCFHGTCRFLVQEDKPACVCHSGYVGARCEHADLLAALAGGGGSGGGGSGGGGSALVLQCIDVDNEDLFFIADKNSFSDDLSKNERIEYNTQSNYIENDFPINELILDTDLISKIELPSENTESLTDFNVDVPVYEKQPAIKKIFTDENTIFQYLYSQTFPLDIRDISLTSSFDDALLFSNKVYSFFSMDYIKTANKVVEAGLFAGWVKQIVNDFVIEANKSNTMDAIADISLIVPYIGLALNVGNETAKGNFENAFEIAGASILLEFIPELLIPVVGAFLLESYIDNKNKIIKTIDNALTKRNEKWSDMYGLIVAQWLSTVNTQFYTIKEGMYKALNYQAQALEEIIKYRYNIYSEKEKSNINIDFNDINSKLNEGINQAIDNINNFINGCSVSYLMKKMIPLAVEKLLDFDNTLKKNLLNYIDENKLYLIGSAEYEKSKVNKYLKTIMPFDLSIYTNDTILIEMFNKYNS

SEQ ID NO: 45 - protein, 864 aa, Artificial Sequence
  source: /note="Description of Artificial Sequence: Synthetic polypeptide"
EFVNKQFNYKDPVNGVDIAYIKIPNAGQMQPVKAFKIHNKIWVIPERDTFTNPEEGDLNPPPEAKQVPVSYYDSTYLSTDNEKDNYLKGVTKLFERIYSTDLGRMLLTSIVRGIPFWGGSTIDTELKVIDTNCINVIQPDGSYRSEELNLVIIGPSADIIQFECKSFGHEVLNLTRNGYGSTQYIRFSPDFTFGFEESLEVDTNPLLGAGKFATDPAVTLAHELIHAGHRLYGIAINPNRVFKVNTNAYYEMSGLEVSFEELRTFGGHDAKFIDSLQENEFRLYYYNKFKDIASTLNKAKSIVGTTASLQYMKNVFKEKYLLSEDTSGKFSVDKLKFDKLYKMLTEIYTEDNFVKFFKVLNRKTYLNFDKAVFKINIVPKVNYTIYDGFNLRNTNLAANFNGQNTEINNMNFTKLKNFTGLFEFYKLLCVDGIITSKTKSDDDDKNKALNLQCIKVNNWDLFFSPSEDNFTNDLNKGEEITSDTNIEAAEENISLDLIQQYYLTFNFDNEPENISIENLSSDIIGQLELMPNIERFPNGKKYELDKYTMFHYLRAQEFEHGKSRIALTNSVNEALLNPSRVYTFFSSDYVKKVNKATEAAMFLGWVEQLVYDFTDETSEVSTTDKIADITIIIPYIGPALNIGNMLYKDDFVGALIFSGAVILLEFIPEIAIPVLGTFALVSYIANKVLTVQTIDNALSKRNEKWDEVYKYIVTNWLAKVNTQIDLIRKKMKEALENQAEATKAIINYQYNQYTEEEKNNINFNIDDLSSKLNESINKAMININKFLNQCSVSYLMNSMIPYGVKRLEDFDASLKDALLKYIYDNRGTLIGQVDRLKDKVNNTLSTDIPFQLSKYVDNQRLLST

SEQ ID NO: 46 - protein, 869 aa, Artificial Sequence
  source: /note="Description of Artificial Sequence: Synthetic polypeptide"
PVTINNFNYNDPIDNNNIIMMEPPFARGTGRYYKAFKITDRIWIIPERYTFGYKPEDFNKSSGIFNRDVCEYYDPDYLNTNDKKNIFLQTMIKLFNRIKSKPLGEKLLEMIINGIPYLGDRRVPLEEFNTNIASVTVNKLISNPGEVERKKGIFANLIIFGPGPVLNENETIDIGIQNHFASREGFGGIMQMKFCPEYVSVFNNVQENKGASIFNRRGYFSDPALILMHELIHVLHGLYGIKVDDLPIVPNEKKFFMQSTDAIQAEELYTFGGQDPSIITPSTDKSIYDKVLQNFRGIVDRLNKVLVCISDPNININIYKNKFKDKYKFVEDSEGKYSIDVESFDKLYKSLMFGFTETNIAENYKIKTRASYFSDSLPPVKIKNLLDNEIYTIEEGFNISDKDMEKEYRGQNKAINKQAYEEISKEHLAVYKIQMCVDEEKLYDDDDKDRWGSSLQCIDVDNEDLFFIADKNSFSDDLSKNERIEYNTQSNYIENDFPINELILDTDLISKIELPSENTESLTDFNVDVPVYEKQPAIKKIFTDENTIFQYLYSQTFPLDIRDISLTSSFDDALLFSNKVYSFFSMDYIKTANKVVEAGLFAGWVKQIVNDFVIEANKSNTMDAIADISLIVPYIGLALNVGNETAKGNFENAFEIAGASILLEFIPELLIPVVGAFLLESYIDNKNKIIKTIDNALTKRNEKWSDMYGLIVAQWLSTVNTQFYTIKEGMYKALNYQAQALEEIIKYRYNIYSEKEKSNINIDFNDINSKLNEGINQAIDNINNFINGCSVSYLMKKMIPLAVEKLLDFDNTLKKNLLNYIDENKLYLIGSAEYEKSKVNKYLKTIMPFDLSIYTNDTILIEMFNKYNS

SEQ ID NO: 47 - protein, 865 aa, Artificial Sequence
  source: /note="Description of Artificial Sequence: Synthetic polypeptide"
PITINNFNYSDPVDNKNILYLDTHLNTLANEPEKAFRITGNIWVIPDRFSRNSNPNLNKPPRVTSPKSGYYDPNYLSTDSDKDTFLKEIIKLFKRINSREIGEELIYRLSTDIPFPGNNNTPINTFDFDVDFNSVDVKTRQGNNWVKTGSINPSVIITGPRENIIDPETSTFKLTNNTFAAQEGFGALSIISISPRFMLTYSNATNDVGEGRFSKSEFCMDPILILMHELNHAMHNLYGIAIPNDQTISSVTSNIFYSQYNVKLEYAEIYAFGGPTIDLIPKSARKYFEEKALDYYRSIAKRLNSITTANPSSFNKYIGEYKQKLIRKYRFVVESSGEVTVNRNKFVELYNELTQIFTEFNYAKIYNVQNRKIYLSNVYTPVTANILDDNVYDIQNGFNIPKSNLNVLFMGQNLSRNPALRKVNPENMLYLFTKFCVDAIDGRSLYNKTLQCRELLVKNTDLPFIGDISDVKTDIFLRKDINEETEVIYYPDNVSVDQVILSKNTSEHGQLDLLYPSIDSESEILPGENQVFYDNRTQNVDYLNSYYYLESQKLSDNVEDFTFTRSIEEALDNSAKVYTYFPTLANKVNAGVQGGLFLMWANDVVEDFTTNILRKDTLDKISDVSAIIPYIGPALNISNSVRRGNFTEAFAVTGVTILLEAFPEFTIPALGAFVIYSKVQERNEIIKTIDNCLEQRIKRWKDSYEWMMGTWLSRIITQFNNISYQMYDSLNYQAGAIKAKIDLEYKKYSGSDKENIKSQVENLKNSLDVKISEAMNNINKFIRECSVTYLFKNMLPKVIDELNEFDRNTKAKLINLIDSHNIILVGEVDKLKAKVNNSFQNTIPFNIFSYTNNSLLKDIINEYFN

SEQ ID NO: 48 - protein, 871 aa, Artificial Sequence
  source: /note="Description of Artificial Sequence: Synthetic polypeptide"
TWPVKDFNYSDPVNDNDILYLRIPQNKLITTPVKAFMITQNIWVIPERFSSDTNPSLSKPPRPTSKYQSYYDPSYLSTDEQKDTFLKGIIKLFKRINERDIGKKLINYLVVGSPFMGDSSTPEDTFDFTRHTTNIAVEKFENGSWKVTNIITPSVLIFGPLPNILDYTASLTLQGQQSNPSFEGFGTLSILKVAPEFLLTFSDVTSNQSSAVLGKSIFCMDPVIALMHELTHSLHQLYGINIPSDKRIRPQVSEGFFSQDGPNVQFEELYTFGGLDVEIIPQIERSQLREKALGHYKDIAKRLNNINKTIPSSWISNIDKYKKIFSEKYNFDKDNTGNFVVNIDKFNSLYSDLTNVMSEVVYSSQYNVKNRTHYFSRHYLPVFANILDDNIYTIRDGFNLTNKGFNIENSGQNIERNPALQKLSSESVVDLFTKVCVDKSEEKLYDDDDKDRWGSSLQCIKVKNNRLPYVADKDSISQEIFENKIITDETNVQNYSDKFSLDESILDGQVPINPEIVDPLLPNVNMEPLNLPGEEIVFYDDITKYVDYLNSYYYLESQKLSNNVENITLTTSVEEALGYSNKIYTFLPSLAEKVNKGVQAGLFLNWANEVVEDFTTNIMKKDTLDKISDVSVIIPYIGPALNIGNSALRGNFNQAFATAGVAFLLEGFPEFTIPALGVFTFYSSIQEREKIIKTIENCLEQRVKRWKDSYQWMVSNWLSRITTQFNHINYQMYDSLSYQADAIKAKIDLEYKKYSGSDKENIKSQVENLKNSLDVKISEAMNNINKFIRECSVTYLFKNMLPKVIDELNKFDLRTKTELINLIDSHNIILVGEVDRLKAKVNESFENTMPFNIFSYTNNSLLKDIINEYFN

SEQ ID NO: 49 - protein, 680 aa, Artificial Sequence
  source: /note="Description of Artificial Sequence: Synthetic polypeptide"
ESNQPEKNGTATKPENSGNTTSENGQTEPEKKLELRNVSDIELYSQTNGTYRQHVSLDGIPENTDTYFVKVKSSAFKDVYIPVASITEEKRNGQSVYKITAKAEKLQQELENKYVDNFTFYLDKKAKEENTNFTSFSNLVKAINQNPSGTYHLAASLNANEVELGPDERSYIKDTFTGRLIGEKDGKNYAIYNLKKPLFENLSGATVEKLSLKNVAISGKNDIGSLANEATNGTKIKQVHVDGCVDGIITSKTKSDDDDKNKALNLQCIKIKNEDLTFIAEKNSFSEEPFQDEIVSYNTKNKPLNFNYSLDKIIVDYNLQSKITLPNDRTTPVTKGIPYAPEYKSNAASTIEIHNIDDNTIYQYLYAQKSPTTLQRITMTNSVDDALINSTKIYSYFPSVISKVNQGAQGILFLQWVRDIIDDFTNESSQKTTIDKISDVSTIVPYIGPALNIVKQGYEGNFIGALETTGVVLLLEYIPEITLPVIAALSIAESSTQKEKIIKTIDNFLEKRYEKWIEVYKLVKAKWLGTVNTQFQKRSYQMYRSLEYQVDAIKKIIDYEYKIYSGPDKEQIADEINNLKNKLEEKANKAMININIFMRESSRSFLVNQMINEAKKQLLEFDTQSKNILMQYIKANSKFIGITELKKLESKINKVFSTPIPFSYSKNLDCWVDNEEDIDV

SEQ ID NO: 50 - protein, 9 aa, Artificial Sequence
  source: /note="Description of Artificial Sequence: Synthetic peptide"
  MOD_RES (2)..(2): D-Phe
  MOD_RES (5)..(5): D-Trp
  misc_feature (9)..(9): /note="C-terminal-alcohol"
CFCFWKTCT

SEQ ID NO: 51 - protein, 30 aa, Artificial Sequence
  source: /note="Description of Artificial Sequence: Synthetic polypeptide"
  MOD_RES (27)..(27): Norleucine
HADAIFTNSYRKVLGQLSARKLLQDILSRC

SEQ ID NO: 52 - protein, 30 aa, Artificial Sequence
  source: /note="Description of Artificial Sequence: Synthetic polypeptide"
  MOD_RES (1)..(1): PhAc-Tyr
  MOD_RES (2)..(2): D-Arg
  MOD_RES (6)..(6): Phe(4-Cl)
  MOD_RES (9)..(9): Homoarginine
  MOD_RES (10)..(10): Tyr(Me)
  MOD_RES (15)..(15): Alpha-aminobutyric acid
  MOD_RES (27)..(27): Norleucine
  MOD_RES (28)..(28): D-Arg
  MOD_RES (29)..(29): Homoarginine
YRDAIFTARYHKVLXQLSAHKLLQDILRRC

SEQ ID NO: 53 - protein, 893 aa, Artificial Sequence
  source: /note="Description of Artificial Sequence: Synthetic polypeptide"
TWPVKDFNYSDPVNDNDILYLRIPQNKLITTPVKAFMITQNIWVIPERFSSDTNPSLSKPPRPTSKYQSYYDPSYLSTDEQKDTFLKGIIKLFKRINERDIGKKLINYLVVGSPFMGDSSTPEDTFDFTRHTTNIAVEKFENGSWKVTNIITPSVLIFGPLPNILDYTASLTLQGQQSNPSFEGFGTLSILKVAPEFLLTFSDVTSNQSSAVLGKSIFCMDPVIALMHELTHSLHQLYGINIPSDKRIRPQVSEGFFSQDGPNVQFEELYTFGGLDVEIIPQIERSQLREKALGHYKDIAKRLNNINKTIPSSWISNIDKYKKIFSEKYNFDKDNTGNFVVNIDKFNSLYSDLTNVMSEVVYSSQYNVKNRTHYFSRHYLPVFANILDDNIYTIRDGFNLTNKGFNIENSGQNIERNPALQKLSSESVVDLFTKVCVDGIITSKTKSDDDDKDFDMLRCMLGRVYRPCWQVALAKRLVLQCIKVKNNRLPYVADKDSISQEIFENKIITDETNVQNYSDKFSLDESILDGQVPINPEIVDPLLPNVNMEPLNLPGEEIVFYDDITKYVDYLNSYYYLESQKLSNNVENITLTTSVEEALGYSNKIYTFLPSLAEKVNKGVQAGLFLNWANEVVEDFTTNIMKKDTLDKISDVSVIIPYIGPALNIGNSALRGNFNQAFATAGVAFLLEGFPEFTIPALGVFTFYSSIQEREKIIKTIENCLEQRVKRWKDSYQWMVSNWLSRITTQFNHINYQMYDSLSYQADAIKAKIDLEYKKYSGSDKENIKSQVENLKNSLDVKISEAMNNINKFIRECSVTYLFKNMLPKVIDELNKFDLRTKTELINLIDSHNIILVGEVDRLKAKVNESFENTMPFNIFSYTNNSLLKDIINEYFN

SEQ ID NO: 54 - protein, 902 aa, Artificial Sequence
  source: /note="Description of Artificial Sequence: Synthetic polypeptide"
TWPVKDFNYSDPVNDNDILYLRIPQNKLITTPVKAFMITQNIWVIPERFSSDTNPSLSKPPRPTSKYQSYYDPSYLSTDEQKDTFLKGIIKLFKRINERDIGKKLINYLVVGSPFMGDSSTPEDTFDFTRHTTNIAVEKFENGSWKVTNIITPSVLIFGPLPNILDYTASLTLQGQQSNPSFEGFGTLSILKVAPEFLLTFSDVTSNQSSAVLGKSIFCMDPVIALMHELTHSLHQLYGINIPSDKRIRPQVSEGFFSQDGPNVQFEELYTFGGLDVEIIPQIERSQLREKALGHYKDIAKRLNNINKTIPSSWISNIDKYKKIFSEKYNFDKDNTGNFVVNIDKFNSLYSDLTNVMSEVVYSSQYNVKNRTHYFSRHYLPVFANILDDNIYTIRDGFNLTNKGFNIENSGQNIERNPALQKLSSESVVDLFTKVCVDKSEEKLYDDDDKDRWGSSLQCIKVKNNRLPYVADKDSISQEIFENKIITDETNVQNYSDKFSLDESILDGQVPINPEIVDPLLPNVNMEPLNLPGEEIVFYDDITKYVDYLNSYYYLESQKLSNNVENITLTTSVEEALGYSNKIYTFLPSLAEKVNKGVQAGLFLNWANEVVEDFTTNIMKKDTLDKISDVSVIIPYIGPALNIGNSALRGNFNQAFATAGVAFLLEGFPEFTIPALGVFTFYSSIQEREKIIKTIENCLEQRVKRWKDSYQWMVSNWLSRITTQFNHINYQMYDSLSYQADAIKAKIDLEYKKYSGSDKENIKSQVENLKNSLDVKISEAMNNINKFIRECSVTYLFKNMLPKVIDELNKFDLRTKTELINLIDSHNIILVGEVDRLKAKVNESFENTMPFNIFSYTNNSLLKDIINEYFNLEGGGGSGGGGSGGGGSALVYNWNSFGLRFG

SEQ ID NO: 55 - protein, 905 aa, Artificial Sequence
  source: /note="Description of Artificial Sequence: Synthetic polypeptide"
EFVNKQFNYKDPVNGVDIAYIKIPNAGQMQPVKAFKIHNKIWVIPERDTFTNPEEGDLNPPPEAKQVPVSYYDSTYLSTDNEKDNYLKGVTKLFERIYSTDLGRMLLTSIVRGIPFWGGSTIDTELKVIDTNCINVIQPDGSYRSEELNLVIIGPSADIIQFECKSFGHEVLNLTRNGYGSTQYIRFSPDFTFGFEESLEVDTNPLLGAGKFATDPAVTLAHELIHAGHRLYGIAINPNRVFKVNTNAYYEMSGLEVSFEELRTFGGHDAKFIDSLQENEFRLYYYNKFKDIASTLNKAKSIVGTTASLQYMKNVFKEKYLLSEDTSGKFSVDKLKFDKLYKMLTEIYTEDNFVKFFKVLNRKTYLNFDKAVFKINIVPKVNYTIYDGFNLRNTNLAANFNGQNTEINNMNFTKLKNFTGLFEFYKLLCVDGIITSKTKSDDDDKNKALNLQCIKVNNWDLFFSPSEDNFTNDLNKGEEITSDTNIEAAEENISLDLIQQYYLTFNFDNEPENISIENLSSDIIGQLELMPNIERFPNGKKYELDKYTMFHYLRAQEFEHGKSRIALTNSVNEALLNPSRVYTFFSSDYVKKVNKATEAAMFLGWVEQLVYDFTDETSEVSTTDKIADITIIIPYIGPALNIGNMLYKDDFVGALIFSGAVILLEFIPEIAIPVLGTFALVSYIANKVLTVQTIDNALSKRNEKWDEVYKYIVTNWLAKVNTQIDLIRKKMKEALENQAEATKAIINYQYNQYTEEEKNNINFNIDDLSSKLNESINKAMININKFLNQCSVSYLMNSMIPYGVKRLEDFDASLKDALLKYIYDNRGTLIGQVDRLKDKVNNTLSTDIPFQLSKYVDNQRLLSTLEGGGGSGGGGSGGGGSALVTPDINPAWYASRGIRPVGRFG

SEQ ID NO: 56 - protein, 927 aa, Artificial Sequence
  source: /note="Description of Artificial Sequence: Synthetic polypeptide"
PITINNFNYSDPVDNKNILYLDTHLNTLANEPEKAFRITGNIWVIPDRFSRNSNPNLNKPPRVTSPKSGYYDPNYLSTDSDKDTFLKEIIKLFKRINSREIGEELIYRLSTDIPFPGNNNTPINTFDFDVDFNSVDVKTRQGNNWVKTGSINPSVIITGPRENIIDPETSTFKLTNNTFAAQEGFGALSIISISPRFMLTYSNATNDVGEGRFSKSEFCMDPILILMHELNHAMHNLYGIAIPNDQTISSVTSNIFYSQYNVKLEYAEIYAFGGPTIDLIPKSARKYFEEKALDYYRSIAKRLNSITTANPSSFNKYIGEYKQKLIRKYRFVVESSGEVTVNRNKFVELYNELTQIFTEFNYAKIYNVQNRKIYLSNVYTPVTANILDDNVYDIQNGFNIPKSNLNVLFMGQNLSRNPALRKVNPENMLYLFTKFCVDGGGGSADDDDKSEEPPISLDLTFHLLREVLEMARAEQLAQQAHSNRKLMEIIALAGGGGSGGGGSGGGGSALVLQCRELLVKNTDLPFIGDISDVKTDIFLRKDINEETEVIYYPDNVSVDQVILSKNTSEHGQLDLLYPSIDSESEILPGENQVFYDNRTQNVDYLNSYYYLESQKLSDNVEDFTFTRSIEEALDNSAKVYTYFPTLANKVNAGVQGGLFLMWANDVVEDFTTNILRKDTLDKISDVSAIIPYIGPALNISNSVRRGNFTEAFAVTGVTILLEAFPEFTIPALGAFVIYSKVQERNEIIKTIDNCLEQRIKRWKDSYEWMMGTWLSRIITQFNNISYQMYDSLNYQAGAIKAKIDLEYKKYSGSDKENIKSQVENLKNSLDVKISEAMNNINKFIRECSVTYLFKNMLPKVIDELNEFDRNTKAKLINLIDSHNIILVGEVDKLKAKVNNSFQNTIPFNIFSYTNNSLLKDIINEYFN

SEQ ID NO: 57 - protein, 915 aa, Artificial Sequence
  source: /note="Description of Artificial Sequence: Synthetic polypeptide"
TWPVKDFNYSDPVNDNDILYLRIPQNKLITTPVKAFMITQNIWVIPERFSSDTNPSLSKPPRPTSKYQSYYDPSYLSTDEQKDTFLKGIIKLFKRINERDIGKKLINYLVVGSPFMGDSSTPEDTFDFTRHTTNIAVEKFENGSWKVTNIITPSVLIFGPLPNILDYTASLTLQGQQSNPSFEGFGTLSILKVAPEFLLTFSDVTSNQSSAVLGKSIFCMDPVIALMHELTHSLHQLYGINIPSDKRIRPQVSEGFFSQDGPNVQFEELYTFGGLDVEIIPQIERSQLREKALGHYKDIAKRLNNINKTIPSSWISNIDKYKKIFSEKYNFDKDNTGNFVVNIDKFNSLYSDLTNVMSEVVYSSQYNVKNRTHYFSRHYLPVFANILDDNIYTIRDGFNLTNKGFNIENSGQNIERNPALQKLSSESVVDLFTKVCVDGIITSKTKSDDDDKYADAIFTNSYRKVLGQLSARKLLQDIMALAGGGGSGGGGSGGGGSALALQCIKVKNNRLPYVADKDSISQEIFENKIITDETNVQNYSDKFSLDESILDGQVPINPEIVDPLLPNVNMEPLNLPGEEIVFYDDITKYVDYLNSYYYLESQKLSNNVENITLTTSVEEALGYSNKIYTFLPSLAEKVNKGVQAGLFLNWANEVVEDFTTNIMKKDTLDKISDVSVIIPYIGPALNIGNSALRGNFNQAFATAGVAFLLEGFPEFTIPALGVFTFYSSIQEREKIIKTIENCLEQRVKRWKDSYQWMVSNWLSRITTQFNHINYQMYDSLSYQADAIKAKIDLEYKKYSGSDKENIKSQVENLKNSLDVKISEAMNNINKFIRECSVTYLFKNMLPKVIDELNKFDLRTKTELINLIDSHNIILVGEVDRLKAKVNESFENTMPFNIFSYTNNSLLKDIINEYFN

SEQ ID NO: 58 - protein, 916 aa, Artificial Sequence
  source: /note="Description of Artificial Sequence: Synthetic polypeptide"
TWPVKDFNYSDPVNDNDILYLRIPQNKLITTPVKAFMITQNIWVIPERFSSDTNPSLSKPPRPTSKYQSYYDPSYLSTDEQKDTFLKGIIKLFKRINERDIGKKLINYLVVGSPFMGDSSTPEDTFDFTRHTTNIAVEKFENGSWKVTNIITPSVLIFGPLPNILDYTASLTLQGQQSNPSFEGFGTLSILKVAPEFLLTFSDVTSNQSSAVLGKSIFCMDPVIALMHELTHSLHQLYGINIPSDKRIRPQVSEGFFSQDGPNVQFEELYTFGGLDVEIIPQIERSQLREKALGHYKDIAKRLNNINKTIPSSWISNIDKYKKIFSEKYNFDKDNTGNFVVNIDKFNSLYSDLTNVMSEVVYSSQYNVKNRTHYFSRHYLPVFANILDDNIYTIRDGFNLTNKGFNIENSGQNIERNPALQKLSSESVVDLFTKVCVDGIITSKTKSDDDDKYADAIFTNSYRKVLGQLSARKLLQDIMSALAGGGGSGGGGSGGGGSALALQCIKVKNNRLPYVADKDSISQEIFENKIITDETNVQNYSDKFSLDESILDGQVPINPEIVDPLLPNVNMEPLNLPGEEIVFYDDITKYVDYLNSYYYLESQKLSNNVENITLTTSVEEALGYSNKIYTFLPSLAEKVNKGVQAGLFLNWANEVVEDFTTNIMKKDTLDKISDVSVIIPYIGPALNIGNSALRGNFNQAFATAGVAFLLEGFPEFTIPALGVFTFYSSIQEREKIIKTIENCLEQRVKRWKDSYQWMVSNWLSRITTQFNHINYQMYDSLSYQADAIKAKIDLEYKKYSGSDKENIKSQVENLKNSLDVKISEAMNNINKFIRECSVTYLFKNMLPKVIDELNKFDLRTKTELINLIDSHNIILVGEVDRLKAKVNESFENTMPFNIFSYTNNSLLKDIINEYFN

SEQ ID NO: 59 - protein, 917 aa, Artificial Sequence
  source: /note="Description of Artificial Sequence: Synthetic polypeptide"
TWPVKDFNYSDPVNDNDILYLRIPQNKLITTPVKAFMITQNIWVIPERFSSDTNPSLSKPPRPTSKYQSYYDPSYLSTDEQKDTFLKGIIKLFKRINERDIGKKLINYLVVGSPFMGDSSTPEDTFDFTRHTTNIAVEKFENGSWKVTNIITPSVLIFGPLPNILDYTASLTLQGQQSNPSFEGFGTLSILKVAPEFLLTFSDVTSNQSSAVLGKSIFCMDPVIALMHELTHSLHQLYGINIPSDKRIRPQVSEGFFSQDGPNVQFEELYTFGGLDVEIIPQIERSQLREKALGHYKDIAKRLNNINKTIPSSWISNIDKYKKIFSEKYNFDKDNTGNFVVNIDKFNSLYSDLTNVMSEVVYSSQYNVKNRTHYFSRHYLPVFANILDDNIYTIRDGFNLTNKGFNIENSGQNIERNPALQKLSSESVVDLFTKVCVDGIITSKTKSDDDDKYADAIFTNSYRKVLGQLSARKLLQDIMSRALAGGGGSGGGGSGGGGSALALQCIKVKNNRLPYVADKDSISQEIFENKIITDETNVQNYSDKFSLDESILDGQVPINPEIVDPLLPNVNMEPLNLPGEEIVFYDDITKYVDYLNSYYYLESQKLSNNVENITLTTSVEEALGYSNKIYTFLPSLAEKVNKGVQAGLFLNWANEVVEDFTTNIMKKDTLDKISDVSVIIPYIGPALNIGNSALRGNFNQAFATAGVAFLLEGFPEFTIPALGVFTFYSSIQEREKIIKTIENCLEQRVKRWKDSYQWMVSNWLSRITTQFNHINYQMYDSLSYQADAIKAKIDLEYKKYSGSDKENIKSQVENLKNSLDVKISEAMNNINKFIRECSVTYLFKNMLPKVIDELNKFDLRTKTELINLIDSHNIILVGEVDRLKAKVNESFENTMPFNIFSYTNNSLLKDIINEYFN

SEQ ID NO: 60 - protein, 932 aa, Artificial Sequence
  source: /note="Description of Artificial Sequence: Synthetic polypeptide"
TWPVKDFNYSDPVNDNDILYLRIPQNKLITTPVKAFMITQNIWVIPERFSSDTNPSLSKPPRPTSKYQSYYDPSYLSTDEQKDTFLKGIIKLFKRINERDIGKKLINYLVVGSPFMGDSSTPEDTFDFTRHTTNIAVEKFENGSWKVTNIITPSVLIFGPLPNILDYTASLTLQGQQSNPSFEGFGTLSILKVAPEFLLTFSDVTSNQSSAVLGKSIFCMDPVIALMHELTHSLHQLYGINIPSDKRIRPQVSEGFFSQDGPNVQFEELYTFGGLDVEIIPQIERSQLREKALGHYKDIAKRLNNINKTIPSSWISNIDKYKKIFSEKYNFDKDNTGNFVVNIDKFNSLYSDLTNVMSEVVYSSQYNVKNRTHYFSRHYLPVFANILDDNIYTIRDGFNLTNKGFNIENSGQNIERNPALQKLSSESVVDLFTKVCVDGIITSKTKSDDDDKYADAIFTNSYRKVLGQLSARKLLQDIMSRQQGESNQERGARARLALAGGGGSGGGGSGGGGSALALQCIKVKNNRLPYVADKDSISQEIFENKIITDETNVQNYSDKFSLDESILDGQVPINPEIVDPLLPNVNMEPLNLPGEEIVFYDDITKYVDYLNSYYYLESQKLSNNVENITLTTSVEEALGYSNKIYTFLPSLAEKVNKGVQAGLFLNWANEVVEDFTTNIMKKDTLDKISDVSVIIPYIGPALNIGNSALRGNFNQAFATAGVAFLLEGFPEFTIPALGVFTFYSSIQEREKIIKTIENCLEQRVKRWKDSYQWMVSNWLSRITTQFNHINYQMYDSLSYQADAIKAKIDLEYKKYSGSDKENIKSQVENLKNSLDVKISEAMNNINKFIRECSVTYLFKNMLPKVIDELNKFDLRTKTELINLIDSHNIILVGEVDRLKAKVNESFENTMPFNIFSYTNNSLLKDIINEYFN

SEQ ID NO: 61 - protein, 927 aa, Artificial Sequence
  source: /note="Description of Artificial Sequence: Synthetic polypeptide"
TWPVKDFNYSDPVNDNDILYLRIPQNKLITTPVKAFMITQNIWVIPERFSSDTNPSLSKPPRPTSKYQSYYDPSYLSTDEQKDTFLKGIIKLFKRINERDIGKKLINYLVVGSPFMGDSSTPEDTFDFTRHTTNIAVEKFENGSWKVTNIITPSVLIFGPLPNILDYTASLTLQGQQSNPSFEGFGTLSILKVAPEFLLTFSDVTSNQSSAVLGKSIFCMDPVIALMHELTHSLHQLYGINIPSDKRIRPQVSEGFFSQDGPNVQFEELYTFGGLDVEIIPQIERSQLREKALGHYKDIAKRLNNINKTIPSSWISNIDKYKKIFSEKYNFDKDNTGNFVVNIDKFNSLYSDLTNVMSEVVYSSQYNVKNRTHYFSRHYLPVFANILDDNIYTIRDGFNLTNKGFNIENSGQNIERNPALQKLSSESVVDLFTKVCVDGIITSKTKSDDDDKYADAIFTNSYRKVLGQLSARKLLQDIMSRQQGESNQERGALAGGGGSGGGGSGGGGSALALQCIKVKNNRLPYVADKDSISQEIFENKIITDETNVQNYSDKFSLDESILDGQVPINPEIVDPLLPNVNMEPLNLPGEEIVFYDDITKYVDYLNSYYYLESQKLSNNVENITLTTSVEEALGYSNKIYTFLPSLAEKVNKGVQAGLFLNWANEVVEDFTTNIMKKDTLDKISDVSVIIPYIGPALNIGNSALRGNFNQAFATAGVAFLLEGFPEFTIPALGVFTFYSSIQEREKIIKTIENCLEQRVKRWKDSYQWMVSNWLSRITTQFNHINYQMYDSLSYQADAIKAKIDLEYKKYSGSDKENIKSQVENLKNSLDVKISEAMNNINKFIRECSVTYLFKNMLPKVIDELNKFDLRTKTELINLIDSHNIILVGEVDRLKAKVNESFENTMPFNIFSYTNNSLLKDIINEYFN

SEQ ID NO: 62 - protein, 917 aa, Artificial Sequence
  source: /note="Description of Artificial Sequence: Synthetic polypeptide"
TWPVKDFNYSDPVNDNDILYLRIPQNKLITTPVKAFMITQNIWVIPERFSSDTNPSLSKPPRPTSKYQSYYDPSYLSTDEQKDTFLKGIIKLFKRINERDIGKKLINYLVVGSPFMGDSSTPEDTFDFTRHTTNIAVEKFENGSWKVTNIITPSVLIFGPLPNILDYTASLTLQGQQSNPSFEGFGTLSILKVAPEFLLTFSDVTSNQSSAVLGKSIFCMDPVIALMHELTHSLHQLYGINIPSDKRIRPQVSEGFFSQDGPNVQFEELYTFGGLDVEIIPQIERSQLREKALGHYKDIAKRLNNINKTIPSSWISNIDKYKKIFSEKYNFDKDNTGNFVVNIDKFNSLYSDLTNVMSEVVYSSQYNVKNRTHYFSRHYLPVFANILDDNIYTIRDGFNLTNKGFNIENSGQNIERNPALQKLSSESVVDLFTKVCVDGIITSKTKSDDDDKYADAIFTNAYRKVLGQLSARKLLQDIMSRALAGGGGSGGGGSGGGGSALALQCIKVKNNRLPYVADKDSISQEIFENKIITDETNVQNYSDKFSLDESILDGQVPINPEIVDPLLPNVNMEPLNLPGEEIVFYDDITKYVDYLNSYYYLESQKLSNNVENITLTTSVEEALGYSNKIYTFLPSLAEKVNKGVQAGLFLNWANEVVEDFTTNIMKKDTLDKISDVSVIIPYIGPALNIGNSALRGNFNQAFATAGVAFLLEGFPEFTIPALGVFTFYSSIQEREKIIKTIENCLEQRVKRWKDSYQWMVSNWLSRITTQFNHINYQMYDSLSYQADAIKAKIDLEYKKYSGSDKENIKSQVENLKNSLDVKISEAMNNINKFIRECSVTYLFKNMLPKVIDELNKFDLRTKTELINLIDSHNIILVGEVDRLKAKVNESFENTMPFNIFSYTNNSLLKDIINEYFN

SEQ ID NO: 63 - protein, 917 aa, Artificial Sequence
  source: /note="Description of Artificial Sequence: Synthetic polypeptide"
TWPVKDFNYSDPVNDNDILYLRIPQNKLITTPVKAFMITQNIWVIPERFSSDTNPSLSKPPRPTSKYQSYYDPSYLSTDEQKDTFLKGIIKLFKRINERDIGKKLINYLVVGSPFMGDSSTPEDTFDFTRHTTNIAVEKFENGSWKVTNIITPSVLIFGPLPNILDYTASLTLQGQQSNPSFEGFGTLSILKVAPEFLLTFSDVTSNQSSAVLGKSIFCMDPVIALMHELTHSLHQLYGINIPSDKRIRPQVSEGFFSQDGPNVQFEELYTFGGLDVEIIPQIERSQLREKALGHYKDIAKRLNNINKTIPSSWISNIDKYKKIFSEKYNFDKDNTGNFVVNIDKFNSLYSDLTNVMSEVVYSSQYNVKNRTHYFSRHYLPVFANILDDNIYTIRDGFNLTNKGFNIENSGQNIERNPALQKLSSESVVDLFTKVCVDGIITSKTKSDDDDKYADAIFTNSYRKVLGQLSARKALQDIMSRALAGGGGSGGGGSGGGGSALALQCIKVKNNRLPYVADKDSISQEIFENKIITDETNVQNYSDKFSLDESILDGQVPINPEIVDPLLPNVNMEPLNLPGEEIVFYDDITKYVDYLNSYYYLESQKLSNNVENITLTTSVEEALGYSNKIYTFLPSLAEKVNKGVQAGLFLNWANEVVEDFTTNIMKKDTLDKISDVSVIIPYIGPALNIGNSALRGNFNQAFATAGVAFLLEGFPEFTIPALGVFTFYSSIQEREKIIKTIENCLEQRVKRWKDSYQWMVSNWLSRITTQFNHINYQMYDSLSYQADAIKAKIDLEYKKYSGSDKENIKSQVENLKNSLDVKISEAMNNINKFIRECSVTYLFKNMLPKVIDELNKFDLRTKTELINLIDSHNIILVGEVDRLKAKVNESFENTMPFNIFSYTNNSLLKDIINEYFN

SEQ ID NO: 64 - protein, 917 aa, Artificial Sequence
  source: /note="Description of Artificial Sequence: Synthetic polypeptide"
TWPVKDFNYSDPVNDNDILYLRIPQNKLITTPVKAFMITQNIWVIPERFSSDTNPSLSKPPRPTSKYQSYYDPSYLSTDEQKDTFLKGIIKLFKRINERDIGKKLINYLVVGSPFMGDSSTPEDTFDFTRHTTNIAVEKFENGSWKVTNIITPSVLIFGPLPNILDYTASLTLQGQQSNPSFEGFGTLSILKVAPEFLLTFSDVTSNQSSAVLGKSIFCMDPVIALMHELTHSLHQLYGINIPSDKRIRPQVSEGFFSQDGPNVQFEELYTFGGLDVEIIPQIERSQLREKALGHYKDIAKRLNNINKTIPSSWISNIDKYKKIFSEKYNFDKDNTGNFVVNIDKFNSLYSDLTNVMSEVVYSSQYNVKNRTHYFSRHYLPVFANILDDNIYTIRDGFNLTNKGFNIENSGQNIERNPALQKLSSESVVDLFTKVCVDGIITSKTKSDDDDKYADAIFTASYKKVLGQLSARKLLQDIMSRALAGGGGSGGGGSGGGGSALALQCIKVKNNRLPYVADKDSISQEIFENKIITDETNVQNYSDKFSLDESILDGQVPINPEIVDPLLPNVNMEPLNLPGEEIVFYDDITKYVDYLNSYYYLESQKLSNNVENITLTTSVEEALGYSNKIYTFLPSLAEKVNKGVQAGLFLNWANEVVEDFTTNIMKKDTLDKISDVSVIIPYIGPALNIGNSALRGNFNQAFATAGVAFLLEGFPEFTIPALGVFTFYSSIQEREKIIKTIENCLEQRVKRWKDSYQWMVSNWLSRITTQFNHINYQMYDSLSYQADAIKAKIDLEYKKYSGSDKENIKSQVENLKNSLDVKISEAMNNINKFIRECSVTYLFKNMLPKVIDELNKFDLRTKTELINLIDSHNIILVGEVDRLKAKVNESFENTMPFNIFSYTNNSLLKDIINEYFN

SEQ ID NO: 65 - protein, 917 aa, Artificial Sequence
  source: /note="Description of Artificial Sequence: Synthetic polypeptide"
TWPVKDFNYSDPVNDNDILYLRIPQNKLITTPVKAFMITQNIWVIPERFSSDTNPSLSKPPRPTSKYQSYYDPSYLSTDEQKDTFLKGIIKLFKRINERDIGKKLINYLVVGSPFMGDSSTPEDTFDFTRHTTNIAVEKFENGSWKVTNIITPSVLIFGPLPNILDYTASLTLQGQQSNPSFEGFGTLSILKVAPEFLLTFSDVTSNQSSAVLGKSIFCMDPVIALMHELTHSLHQLYGINIPSDKRIRPQVSEGFFSQDGPNVQFEELYTFGGLDVEIIPQIERSQLREKALGHYKDIAKRLNNINKTIPSSWISNIDKYKKIFSEKYNFDKDNTGNFVVNIDKFNSLYSDLTNVMSEVVYSSQYNVKNRTHYFSRHYLPVFANILDDNIYTIRDGFNLTNKGFNIENSGQNIERNPALQKLSSESVVDLFTKVCVDGIITSKTKSDDDDKYADAIFTASYKRVLGQLSARKLLQDIMSRALAGGGGSGGGGSGGGGSALALQCIKVKNNRLPYVADKDSISQEIFENKIITDETNVQNYSDKFSLDESILDGQVPINPEIVDPLLPNVNMEPLNLPGEEIVFYDDITKYVDYLNSYYYLESQKLSNNVENITLTTSVEEALGYSNKIYTFLPSLAEKVNKGVQAGLFLNWANEVVEDFTTNIMKKDTLDKISDVSVIIPYIGPALNIGNSALRGNFNQAFATAGVAFLLEGFPEFTIPALGVFTFYSSIQEREKIIKTIENCLEQRVKRWKDSYQWMVSNWLSRITTQFNHINYQMYDSLSYQADAIKAKIDLEYKKYSGSDKENIKSQVENLKNSLDVKISEAMNNINKFIRECSVTYLFKNMLPKVIDELNKFDLRTKTELINLIDSHNIILVGEVDRLKAKVNESFENTMPFNIFSYTNNSLLKDIINEYFN

SEQ ID NO: 66 - protein, 917 aa, Artificial Sequence
  source: /note="Description of Artificial Sequence: Synthetic polypeptide"
TWPVKDFNYSDPVNDNDILYLRIPQNKLITTPVKAFMITQNIWVIPERFSSDTNPSLSKPPRPTSKYQSYYDPSYLSTDEQKDTFLKGIIKLFKRINERDIGKKLINYLVVGSPFMGDSSTPEDTFDFTRHTTNIAVEKFENGSWKVTNIITPSVLIFGPLPNILDYTASLTLQGQQSNPSFEGFGTLSILKVAPEFLLTFSDVTSNQSSAVLGKSIFCMDPVIALMHELTHSLHQLYGINIPSDKRIRPQVSEGFFSQDGPNVQFEELYTFGGLDVEIIPQIERSQLREKALGHYKDIAKRLNNINKTIPSSWISNIDKYKKIFSEKYNFDKDNTGNFVVNIDKFNSLYSDLTNVMSEVVYSSQYNVKNRTHYFSRHYLPVFANILDDNIYTIRDGFNLTNKGFNIENSGQNIERNPALQKLSSESVVDLFTKVCVDGIITSKTKSDDDDKYADAIFTASYNKVLGQLSARKLLQDIMSRALAGGGGSGGGGSGGGGSALALQCIKVKNNRLPYVADKDSISQEIFENKIITDETNVQNYSDKFSLDESILDGQVPINPEIVDPLLPNVNMEPLNLPGEEIVFYDDITKYVDYLNSYYYLESQKLSNNVENITLTTSVEEALGYSNKIYTFLPSLAEKVNKGVQAGLFLNWANEVVEDFTTNIMKKDTLDKISDVSVIIPYIGPALNIGNSALRGNFNQAFATAGVAFLLEGFPEFTIPALGVFTFYSSIQEREKIIKTIENCLEQRVKRWKDSYQWMVSNWLSRITTQFNHINYQMYDSLSYQADAIKAKIDLEYKKYSGSDKENIKSQVENLKNSLDVKISEAMNNINKFIRECSVTYLFKNMLPKVIDELNKFDLRTKTELINLIDSHNIILVGEVDRLKAKVNESFENTMPFNIFSYTNNSLLKDIINEYFN

SEQ ID NO: 67 - protein, 917 aa, Artificial Sequence
  source: /note="Description of Artificial Sequence: Synthetic polypeptide"
TWPVKDFNYSDPVNDNDILYLRIPQNKLITTPVKAFMITQNIWVIPERFSSDTNPSLSKPPRPTSKYQSYYDPSYLSTDEQKDTFLKGIIKLFKRINERDIGKKLINYLVVGSPFMGDSSTPEDTFDFTRHTTNIAVEKFENGSWKVTNIITPSVLIFGPLPNILDYTASLTLQGQQSNPSFEGFGTLSILKVAPEFLLTFSDVTSNQSSAVLGKSIFCMDPVIALMHELTHSLHQLYGINIPSDKRIRPQVSEGFFSQDGPNVQFEELYTFGGLDVEIIPQIERSQLREKALGHYKDIAKRLNNINKTIPSSWISNIDKYKKIFSEKYNFDKDNTGNFVVNIDKFNSLYSDLTNVMSEVVYSSQYNVKNRTHYFSRHYLPVFANILDDNIYTIRDGFNLTNKGFNIENSGQNIERNPALQKLSSESVVDLFTKVCVDGIITSKTKSDDDDKYADAIFTASYRKVLGQLSAKKLLQDIMSRALAGGGGSGGGGSGGGGSALALQCIKVKNNRLPYVADKDSISQEIFENKIITDETNVQNYSDKFSLDESILDGQVPINPEIVDPLLPNVNMEPLNLPGEEIVFYDDITKYVDYLNSYYYLESQKLSNNVENITLTTSVEEALGYSNKIYTFLPSLAEKVNKGVQAGLFLNWANEVVEDFTTNIMKKDTLDKISDVSVIIPYIGPALNIGNSALRGNFNQAFATAGVAFLLEGFPEFTIPALGVFTFYSSIQEREKIIKTIENCLEQRVKRWKDSYQWMVSNWLSRITTQFNHINYQMYDSLSYQADAIKAKIDLEYKKYSGSDKENIKSQVENLKNSLDVKISEAMNNINKFIRECSVTYLFKNMLPKVIDELNKFDLRTKTELINLIDSHNIILVGEVDRLKAKVNESFENTMPFNIFSYTNNSLLKDIINEYFN

SEQ ID NO: 68 - protein, 917 aa, Artificial Sequence
  source: /note="Description of Artificial Sequence: Synthetic polypeptide"
TWPVKDFNYSDPVNDNDILYLRIPQNKLITTPVKAFMITQNIWVIPERFSSDTNPSLSKPPRPTSKYQSYYDPSYLSTDEQKDTFLKGIIKLFKRINERDIGKKLINYLVVGSPFMGDSSTPEDTFDFTRHTTNIAVEKFENGSWKVTNIITPSVLIFGPLPNILDYTASLTLQGQQSNPSFEGFGTLSILKVAPEFLLTFSDVTSNQSSAVLGKSIFCMDPVIALMHELTHSLHQLYGINIPSDKRIRPQVSEGFFSQDGPNVQFEELYTFGGLDVEIIPQIERSQLREKALGHYKDIAKRLNNINKTIPSSWISNIDKYKKIFSEKYNFDKDNTGNFVVNIDKFNSLYSDLTNVMSEVVYSSQYNVKNRTHYFSRHYLPVFANILDDNIYTIRDGFNLTNKGFNIENSGQNIERNPALQKLSSESVVDLFTKVCVDGIITSKTKSDDDDKYADAIFTASYKKVLGQLSAKKLLQDIMSRALAGGGGSGGGGSGGGGSALALQCIKVKNNRLPYVADKDSISQEIFENKIITDETNVQNYSDKFSLDESILDGQVPINPEIVDPLLPNVNMEPLNLPGEEIVFYDDITKYVDYLNSYYYLESQKLSNNVENITLTTSVEEALGYSNKIYTFLPSLAEKVNKGVQAGLFLNWANEVVEDFTTNIMKKDTLDKISDVSVIIPYIGPALNIGNSALRGNFNQAFATAGVAFLLEGFPEFTIPALGVFTFYSSIQEREKIIKTIENCLEQRVKRWKDSYQWMVSNWLSRITTQFNHINYQMYDSLSYQADAIKAKIDLEYKKYSGSDKENIKSQVENLKNSLDVKISEAMNNINKFIRECSVTYLFKNMLPKVIDELNKFDLRTKTELINLIDSHNIILVGEVDRLKAKVNESFENTMPFNIFSYTNNSLLKDIINEYFN

SEQ ID NO: 69 - protein, 917 aa, Artificial Sequence
  source: /note="Description of Artificial Sequence: Synthetic polypeptide"
TWPVKDFNYSDPVNDNDILYLRIPQNKLITTPVKAFMITQNIWVIPERFSSDTNPSLSKPPRPTSKYQSYYDPSYLSTDEQKDTFLKGIIKLFKRINERDIGKKLINYLVVGSPFMGDSSTPEDTFDFTRHTTNIAVEKFENGSWKVTNIITPSVLIFGPLPNILDYTASLTLQGQQSNPSFEGFGTLSILKVAPEFLLTFSDVTSNQSSAVLGKSIFCMDPVIALMHELTHSLHQLYGINIPSDKRIRPQVSEGFFSQDGPNVQFEELYTFGGLDVEIIPQIERSQLREKALGHYKDIAKRLNNINKTIPSSWISNIDKYKKIFSEKYNFDKDNTGNFVVNIDKFNSLYSDLTNVMSEVVYSSQYNVKNRTHYFSRHYLPVFANILDDNIYTIRDGFNLTNKGFNIENSGQNIERNPALQKLSSESVVDLFTKVCVDGIITSKTKSDDDDKYADAIFTASYRKVLGQLSANKLLQDIMSRALAGGGGSGGGGSGGGGSALALQCIKVKNNRLPYVADKDSISQEIFENKIITDETNVQNYSDKFSLDESILDGQVPINPEIVDPLLPNVNMEPLNLPGEEIVFYDDITKYVDYLNSYYYLESQKLSNNVENITLTTSVEEALGYSNKIYTFLPSLAEKVNKGVQAGLFLNWANEVVEDFTTNIMKKDTLDKISDVSVIIPYIGPALNIGNSALRGNFNQAFATAGVAFLLEGFPEFTIPALGVFTFYSSIQEREKIIKTIENCLEQRVKRWKDSYQWMVSNWLSRITTQFNHINYQMYDSLSYQADAIKAKIDLEYKKYSGSDKENIKSQVENLKNSLDVKISEAMNNINKFIRECSVTYLFKNMLPKVIDELNKFDLRTKTELINLIDSHNIILVGEVDRLKAKVNESFENTMPFNIFSYTNNSLLKDIINEYFN

SEQ ID NO: 70 - protein, 917 aa, Artificial Sequence
  source: /note="Description of Artificial Sequence: Synthetic polypeptide"
TWPVKDFNYSDPVNDNDILYLRIPQNKLITTPVKAFMITQNIWVIPERFSSDTNPSLSKPPRPTSKYQSYYDPSYLSTDEQKDTFLKGIIKLFKRINERDIGKKLINYLVVGSPFMGDSSTPEDTFDFTRHTTNIAVEKFENGSWKVTNIITPSVLIFGPLPNILDYTASLTLQGQQSNPSFEGFGTLSILKVAPEFLLTFSDVTSNQSSAVLGKSIFCMDPVIALMHELTHSLHQLYGINIPSDKRIRPQVSEGFFSQDGPNVQFEELYTFGGLDVEIIPQIERSQLREKALGHYKDIAKRLNNINKTIPSSWISNIDKYKKIFSEKYNFDKDNTGNFVVNIDKFNSLYSDLTNVMSEVVYSSQYNVKNRTHYFSRHYLPVFANILDDNIYTIRDGFNLTNKGFNIENSGQNIERNPALQKLSSESVVDLFTKVCVDGIITSKTKSDDDDKYADAIFTASYRNVLGQLSARKLLQDIMSRALAGGGGSGGGGSGGGGSALALQCIKVKNNRLPYVADKDSISQEIFENKIITDETNVQNYSDKFSLDESILDGQVPINPEIVDPLLPNVNMEPLNLPGEEIVFYDDITKYVDYLNSYYYLESQKLSNNVENITLTTSVEEALGYSNKIYTFLPSLAEKVNKGVQAGLFLNWANEVVEDFTTNIMKKDTLDKISDVSVIIPYIGPALNIGNSALRGNFNQAFATAGVAFLLEGFPEFTIPALGVFTFYSSIQEREKIIKTIENCLEQRVKRWKDSYQWMVSNWLSRITTQFNHINYQMYDSLSYQADAIKAKIDLEYKKYSGSDKENIKSQVENLKNSLDVKISEAMNNINKFIRECSVTYLFKNMLPKVIDELNKFDLRTKTELINLIDSHNIILVGEVDRLKAKVNESFENTMPFNIFSYTNNSLLKDIINEYFN

SEQ ID NO: 71 - protein, 917 aa, Artificial Sequence
  source: /note="Description of Artificial Sequence: Synthetic polypeptide"
TWPVKDFNYSDPVNDNDILYLRIPQNKLITTPVKAFMITQNIWVIPERFSSDTNPSLSKPPRPTSKYQSYYDPSYLSTDEQKDTFLKGIIKLFKRINERDIGKKLINYLVVGSPFMGDSSTPEDTFDFTRHTTNIAVEKFENGSWKVTNIITPSVLIFGPLPNILDYTASLTLQGQQSNPSFEGFGTLSILKVAPEFLLTFSDVTSNQSSAVLGKSIFCMDPVIALMHELTHSLHQLYGINIPSDKRIRPQVSEGFFSQDGPNVQFEELYTFGGLDVEIIPQIERSQLREKALGHYKDIAKRLNNINKTIPSSWISNIDKYKKIFSEKYNFDKDNTGNFVVNIDKFNSLYSDLTNVMSEVVYSSQYNVKNRTHYFSRHYLPVFANILDDNIYTIRDGFNLTNKGFNIENSGQNIERNPALQKLSSESVVDLFTKVCVDGIITSKTKSDDDDKYADAIFTASYRKVLGQLSARNLLQDIMSRALAGGGGSGGGGSGGGGSALALQCIKVKNNRLPYVADKDSISQEIFENKIITDETNVQNYSDKFSLDESILDGQVPINPEIVDPLLPNVNMEPLNLPGEEIVFYDDITKYVDYLNSYYYLESQKLSNNVENITLTTSVEEALGYSNKIYTFLPSLAEKVNKGVQAGLFLNWANEVVEDFTTNIMKKDTLDKISDVSVIIPYIGPALNIGNSALRGNFNQAFATAGVAFLLEGFPEFTIPALGVFTFYSSIQEREKIIKTIENCLEQRVKRWKDSYQWMVSNWLSRITTQFNHINYQMYDSLSYQADAIKAKIDLEYKKYSGSDKENIKSQVENLKNSLDVKISEAMNNINKFIRECSVTYLFKNMLPKVIDELNKFDLRTKTELINLIDSHNIILVGEVDRLKAKVNESFENTMPFNIFSYTNNSLLKDIINEYFN

SEQ ID NO: 72 - protein, 917 aa, Artificial Sequence
  source: /note="Description of Artificial Sequence: Synthetic polypeptide"
TWPVKDFNYSDPVNDNDILYLRIPQNKLITTPVKAFMITQNIWVIPERFSSDTNPSLSKPPRPTSKYQSYYDPSYLSTDEQKDTFLKGIIKLFKRINERDIGKKLINYLVVGSPFMGDSSTPEDTFDFTRHTTNIAVEKFENGSWKVTNIITPSVLIFGPLPNILDYTASLTLQGQQSNPSFEGFGTLSILKVAPEFLLTFSDVTSNQSSAVLGKSIFCMDPVIALMHELTHSLHQLYGINIPSDKRIRPQVSEGFFSQDGPNVQFEELYTFGGLDVEIIPQIERSQLREKALGHYKDIAKRLNNINKTIPSSWISNIDKYKKIFSEKYNFDKDNTGNFVVNIDKFNSLYSDLTNVMSEVVYSSQYNVKNRTHYFSRHYLPVFANILDDNIYTIRDGFNLTNKGFNIENSGQNIERNPALQKLSSESVVDLFTKVCVDGIITSKTKSDDDDKYADAIFEASYRKVLGQLSARKLLQDIMSRALAGGGGSGGGGSGGGGSALALQCIKVKNNRLPYVADKDSISQEIFENKIITDETNVQNYSDKFSLDESILDGQVPINPEIVDPLLPNVNMEPLNLPGEEIVFYDDITKYVDYLNSYYYLESQKLSNNVENITLTTSVEEALGYSNKIYTFLPSLAEKVNKGVQAGLFLNWANEVVEDFTTNIMKKDTLDKISDVSVIIPYIGPALNIGNSALRGNFNQAFATAGVAFLLEGFPEFTIPALGVFTFYSSIQEREKIIKTIENCLEQRVKRWKDSYQWMVSNWLSRITTQFNHINYQMYDSLSYQADAIKAKIDLEYKKYSGSDKENIKSQVENLKNSLDVKISEAMNNINKFIRECSVTYLFKNMLPKVIDELNKFDLRTKTELINLIDSHNIILVGEVDRLKAKVNESFENTMPFNIFSYTNNSLLKDIINEYFN

SEQ ID NO: 73 - protein, 917 aa, Artificial Sequence
  source: /note="Description of Artificial Sequence: Synthetic polypeptide"
TWPVKDFNYSDPVNDNDILYLRIPQNKLITTPVKAFMITQNIWVIPERFSSDTNPSLSKPPRPTSKYQSYYDPSYLSTDEQKDTFLKGIIKLFKRINERDIGKKLINYLVVGSPFMGDSSTPEDTFDFTRHTTNIAVEKFENGSWKVTNIITPSVLIFGPLPNILDYTASLTLQGQQSNPSFEGFGTLSILKVAPEFLLTFSDVTSNQSSAVLGKSIFCMDPVIALMHELTHSLHQLYGINIPSDKRIRPQVSEGFFSQDGPNVQFEELYTFGGLDVEIIPQIERSQLREKALGHYKDIAKRLNNINKTIPSSWISNIDKYKKIFSEKYNFDKDNTGNFVVNIDKFNSLYSDLTNVMSEVVYSSQYNVKNRTHYFSRHYLPVFANILDDNIYTIRDGFNLTNKGFNIENSGQNIERNPALQKLSSESVVDLFTKVCVDGIITSKTKSDDDDKYADAIFTASERKVLGQLSARKLLQDIMSRALAGGGGSGGGGSGGGGSALALQCIKVKNNRLPYVADKDSISQEIFENKIITDETNVQNYSDKFSLDESILDGQVPINPEIVDPLLPNVNMEPLNLPGEEIVFYDDITKYVDYLNSYYYLESQKLSNNVENITLTTSVEEALGYSNKIYTFLPSLAEKVNKGVQAGLFLNWANEVVEDFTTNIMKKDTLDKISDVSVIIPYIGPALNIGNSALRGNFNQAFATAGVAFLLEGFPEFTIPALGVFTFYSSIQEREKIIKTIENCLEQRVKRWKDSYQWMVSNWLSRITTQFNHINYQMYDSLSYQADAIKAKIDLEYKKYSGSDKENIKSQVENLKNSLDVKISEAMNNINKFIRECSVTYLFKNMLPKVIDELNKFDLRTKTELINLIDSHNIILVGEVDRLKAKVNESFENTMPFNIFSYTNNSLLKDIINEYFN

SEQ ID NO: 74 - protein, 917 aa, Artificial Sequence
  source: /note="Description of Artificial Sequence: Synthetic polypeptide"
TWPVKDFNYSDPVNDNDILYLRIPQNKLITTPVKAFMITQNIWVIPERFSSDTNPSLSKPPRPTSKYQSYYDPSYLSTDEQKDTFLKGIIKLFKRINERDIGKKLINYLVVGSPFMGDSSTPEDTFDFTRHTTNIAVEKFENGSWKVTNIITPSVLIFGPLPNILDYTASLTLQGQQSNPSFEGFGTLSILKVAPEFLLTFSDVTSNQSSAVLGKSIFCMDPVIALMHELTHSLHQLYGINIPSDKRIRPQVSEGFFSQDGPNVQFEELYTFGGLDVEIIPQIERSQLREKALGHYKDIAKRLNNINKTIPSSWISNIDKYKKIFSEKYNFDKDNTGNFVVNIDKFNSLYSDLTNVMSEVVYSSQYNVKNRTHYFSRHYLPVFANILDDNIYTIRDGFNLTNKGFNIENSGQNIERNPALQKLSSESVVDLFTKVCVDGIITSKTKSDDDDKYADAIFTASYRKELGQLSARKLLQDIMSRALAGGGGSGGGGSGGGGSALALQCIKVKNNRLPYVADKDSISQEIFENKIITDETNVQNYSDKFSLDESILDGQVPINPEIVDPLLPNVNMEPLNLPGEEIVFYDDITKYVDYLNSYYYLESQKLSNNVENITLTTSVEEALGYSNKIYTFLPSLAEKVNKGVQAGLFLNWANEVVEDFTTNIMKKDTLDKISDVSVIIPYIGPALNIGNSALRGNFNQAFATAGVAFLLEGFPEFTIPALGVFTFYSSIQEREKIIKTIENCLEQRVKRWKDSYQWMVSNWLSRITTQFNHINYQMYDSLSYQADAIKAKIDLEYKKYSGSDKENIKSQVENLKNSLDVKISEAMNNINKFIRECSVTYLFKNMLPKVIDELNKFDLRTKTELINLIDSHNIILVGEVDRLKAKVNESFENTMPFNIFSYTNNSLLKDIINEYFN

SEQ ID NO: 75 - protein, 917 aa, Artificial Sequence
  source: /note="Description of Artificial Sequence: Synthetic polypeptide"
TWPVKDFNYSDPVNDNDILYLRIPQNKLITTPVKAFMITQNIWVIPERFSSDTNPSLSKPPRPTSKYQSYYDPSYLSTDEQKDTFLKGIIKLFKRINERDIGKKLINYLVVGSPFMGDSSTPEDTFDFTRHTTNIAVEKFENGSWKVTNIITPSVLIFGPLPNILDYTASLTLQGQQSNPSFEGFGTLSILKVAPEFLLTFSDVTSNQSSAVLGKSIFCMDPVIALMHELTHSLHQLYGINIPSDKRIRPQVSEGFFSQDGPNVQFEELYTFGGLDVEIIPQIERSQLREKALGHYKDIAKRLNNINKTIPSSWISNIDKYKKIFSEKYNFDKDNTGNFVVNIDKFNSLYSDLTNVMSEVVYSSQYNVKNRTHYFSRHYLPVFANILDDNIYTIRDGFNLTNKGFNIENSGQNIERNPALQKLSSESVVDLFTKVCVDGIITSKTKSDDDDKYADAIFTASYRKVLGQLSARKLLQDIMSRALAGGGGSGGGGSGGGGSALALQCIKVKNNRLPYVADKDSISQEIFENKIITDETNVQNYSDKFSLDESILDGQVPINPEIVDPLLPNVNMEPLNLPGEEIVFYDDITKYVDYLNSYYYLESQKLSNNVENITLTTSVEEALGYSNKIYTFLPSLAEKVNKGVQAGLFLNWANEVVEDFTTNIMKKDTLDKISDVSVIIPYIGPALNIGNSALRGNFNQAFATAGVAFLLEGFPEFTIPALGVFTFYSSIQEREKIIKTIENCLEQRVKRWKDSYQWMVSNWLSRITTQFNHINYQMYDSLSYQADAIKAKIDLEYKKYSGSDKENIKSQVENLKNSLDVKISEAMNNINKFIRECSVTYLFKNMLPKVIDELNKFDLRTKTELINLIDSHNIILVGEVDRLKAKVNESFENTMPFNIFSYTNNSLLKDIINEYFN

SEQ ID NO: 76 - protein, 917 aa, Artificial Sequence
  source: /note="Description of Artificial Sequence: Synthetic polypeptide"
TWPVKDFNYSDPVNDNDILYLRIPQNKLITTPVKAFMITQNIWVIPERFSSDTNPSLSKPPRPTSKYQSYYDPSYLSTDEQKDTFLKGIIKLFKRINERDIGKKLINYLVVGSPFMGDSSTPEDTFDFTRHTTNIAVEKFENGSWKVTNIITPSVLIFGPLPNILDYTASLTLQGQQSNPSFEGFGTLSILKVAPEFLLTFSDVTSNQSSAVLGKSIFCMDPVIALMHELTHSLHQLYGINIPSDKRIRPQVSEGFFSQDGPNVQFEELYTFGGLDVEIIPQIERSQLREKALGHYKDIAKRLNNINKTIPSSWISNIDKYKKIFSEKYNFDKDNTGNFVVNIDKFNSLYSDLTNVMSEVVYSSQYNVKNRTHYFSRHYLPVFANILDDNIYTIRDGFNLTNKGFNIENSGQNIERNPALQKLSSESVVDLFTKVCVDGIITSKTKSDDDDKYADAIFTESYRKVLGQLSARKLLQDIMSRALAGGGGSGGGGSGGGGSALALQCIKVKNNRLPYVADKDSISQEIFENKIITDETNVQNYSDKFSLDESILDGQVPINPEIVDPLLPNVNMEPLNLPGEEIVFYDDITKYVDYLNSYYYLESQKLSNNVENITLTTSVEEALGYSNKIYTFLPSLAEKVNKGVQAGLFLNWANEVVEDFTTNIMKKDTLDKISDVSVIIPYIGPALNIGNSALRGNFNQAFATAGVAFLLEGFPEFTIPALGVFTFYSSIQEREKIIKTIENCLEQRVKRWKDSYQWMVSNWLSRITTQFNHINYQMYDSLSYQADAIKAKIDLEYKKYSGSDKENIKSQVENLKNSLDVKISEAMNNINKFIRECSVTYLFKNMLPKVIDELNKFDLRTKTELINLIDSHNIILVGEVDRLKAKVNESFENTMPFNIFSYTNNSLLKDIINEYFN

SEQ ID NO: 77 - protein, 915 aa, Artificial Sequence
  source: /note="Description of Artificial Sequence: Synthetic polypeptide"
TWPVKDFNYSDPVNDNDILYLRIPQNKLITTPVKAFMITQNIWVIPERFSSDTNPSLSKPPRPTSKYQSYYDPSYLSTDEQKDTFLKGIIKLFKRINERDIGKKLINYLVVGSPFMGDSSTPEDTFDFTRHTTNIAVEKFENGSWKVTNIITPSVLIFGPLPNILDYTASLTLQGQQSNPSFEGFGTLSILKVAPEFLLTFSDVTSNQSSAVLGKSIFCMDPVIALMHELTHSLHQLYGINIPSDKRIRPQVSEGFFSQDGPNVQFEELYTFGGLDVEIIPQIERSQLREKALGHYKDIAKRLNNINKTIPSSWISNIDKYKKIFSEKYNFDKDNTGNFVVNIDKFNSLYSDLTNVMSEVVYSSQYNVKNRTHYFSRHYLPVFANILDDNIYTIRDGFNLTNKGFNIENSGQNIERNPALQKLSSESVVDLFTKVCVDGIITSKTKSDDDDKYADAIFTNSYRKVLAQLSARKLLQDIMALAGGGGSGGGGSGGGGSALALQCIKVKNNRLPYVADKDSISQEIFENKIITDETNVQNYSDKFSLDESILDGQVPINPEIVDPLLPNVNMEPLNLPGEEIVFYDDITKYVDYLNSYYYLESQKLSNNVENITLTTSVEEALGYSNKIYTFLPSLAEKVNKGVQAGLFLNWANEVVEDFTTNIMKKDTLDKISDVSVIIPYIGPALNIGNSALRGNFNQAFATAGVAFLLEGFPEFTIPALGVFTFYSSIQEREKIIKTIENCLEQRVKRWKDSYQWMVSNWLSRITTQFNHINYQMYDSLSYQADAIKAKIDLEYKKYSGSDKENIKSQVENLKNSLDVKISEAMNNINKFIRECSVTYLFKNMLPKVIDELNKFDLRTKTELINLIDSHNIILVGEVDRLKAKVNESFENTMPFNIFSYTNNSLLKDIINEYFN

SEQ ID NO: 78 - protein, 917 aa, Artificial Sequence
  source: /note="Description of Artificial Sequence: Synthetic polypeptide"
TWPVKDFNYSDPVNDNDILYLRIPQNKLITTPVKAFMITQNIWVIPERFSSDTNPSLSKPPRPTSKYQSYYDPSYLSTDEQKDTFLKGIIKLFKRINERDIGKKLINYLVVGSPFMGDSSTPEDTFDFTRHTTNIAVEKFENGSWKVTNIITPSVLIFGPLPNILDYTASLTLQGQQSNPSFEGFGTLSILKVAPEFLLTFSDVTSNQSSAVLGKSIFCMDPVIALMHELTHSLHQLYGINIPSDKRIRPQVSEGFFSQDGPNVQFEELYTFGGLDVEIIPQIERSQLREKALGHYKDIAKRLNNINKTIPSSWISNIDKYKKIFSEKYNFDKDNTGNFVVNIDKFNSLYSDLTNVMSEVVYSSQYNVKNRTHYFSRHYLPVFANILDDNIYTIRDGFNLTNKGFNIENSGQNIERNPALQKLSSESVVDLFTKVCVDGIITSKTKSDDDDKYADAIFTNSYRKVLAQLSARKLLQDIMSRALAGGGGSGGGGSGGGGSALALQCIKVKNNRLPYVADKDSISQEIFENKIITDETNVQNYSDKFSLDESILDGQVPINPEIVDPLLPNVNMEPLNLPGEEIVFYDDITKYVDYLNSYYYLESQKLSNNVENITLTTSVEEALGYSNKIYTFLPSLAEKVNKGVQAGLFLNWANEVVEDFTTNIMKKDTLDKISDVSVIIPYIGPALNIGNSALRGNFNQAFATAGVAFLLEGFPEFTIPALGVFTFYSSIQEREKIIKTIENCLEQRVKRWKDSYQWMVSNWLSRITTQFNHINYQMYDSLSYQADAIKAKIDLEYKKYSGSDKENIKSQVENLKNSLDVKISEAMNNINKFIRECSVTYLFKNMLPKVIDELNKFDLRTKTELINLIDSHNIILVGEVDRLKAKVNESFENTMPFNIFSYTNNSLLKDIINEYFN

SEQ ID NO: 79 - protein, 917 aa, Artificial Sequence
  source: /note="Description of Artificial Sequence: Synthetic polypeptide"
TWPVKDFNYSDPVNDNDILYLRIPQNKLITTPVKAFMITQNIWVIPERFSSDTNPSLSKPPRPTSKYQSYYDPSYLSTDEQKDTFLKGIIKLFKRINERDIGKKLINYLVVGSPFMGDSSTPEDTFDFTRHTTNIAVEKFENGSWKVTNIITPSVLIFGPLPNILDYTASLTLQGQQSNPSFEGFGTLSILKVAPEFLLTFSDVTSNQSSAVLGKSIFCMDPVIALMHELTHSLHQLYGINIPSDKRIRPQVSEGFFSQDGPNVQFEELYTFGGLDVEIIPQIERSQLREKALGHYKDIAKRLNNINKTIPSSWISNIDKYKKIFSEKYNFDKDNTGNFVVNIDKFNSLYSDLTNVMSEVVYSSQYNVKNRTHYFSRHYLPVFANILDDNIYTIRDGFNLTNKGFNIENSGQNIERNPALQKLSSESVVDLFTKVCVDGIITSKTKSDDDDKYADAIFTASYRKVLAQLSARKLLQDIMSRALAGGGGSGGGGSGGGGSALALQCIKVKNNRLPYVADKDSISQEIFENKIITDETNVQNYSDKFSLDESILDGQVPINPEIVDPLLPNVNMEPLNLPGEEIVFYDDITKYVDYLNSYYYLESQKLSNNVENITLTTSVEEALGYSNKIYTFLPSLAEKVNKGVQAGLFLNWANEVVEDFTTNIMKKDTLDKISDVSVIIPYIGPALNIGNSALRGNFNQAFATAGVAFLLEGFPEFTIPALGVFTFYSSIQEREKIIKTIENCLEQRVKRWKDSYQWMVSNWLSRITTQFNHINYQMYDSLSYQADAIKAKIDLEYKKYSGSDKENIKSQVENLKNSLDVKISEAMNNINKFIRECSVTYLFKNMLPKVIDELNKFDLRTKTELINLIDSHNIILVGEVDRLKAKVNESFENTMPFNIFSYTNNSLLKDIINEYFN

SEQ ID NO: 80 - protein, 917 aa, Artificial Sequence
  source: /note="Description of Artificial Sequence: Synthetic polypeptide"
TWPVKDFNYSDPVNDNDILYLRIPQNKLITTPVKAFMITQNIWVIPERFSSDTNPSLSKPPRPTSKYQSYYDPSYLSTDEQKDTFLKGIIKLFKRINERDIGKKLINYLVVGSPFMGDSSTPEDTFDFTRHTTNIAVEKFENGSWKVTNIITPSVLIFGPLPNILDYTASLTLQGQQSNPSFEGFGTLSILKVAPEFLLTFSDVTSNQSSAVLGKSIFCMDPVIALMHELTHSLHQLYGINIPSDKRIRPQVSEGFFSQDGPNVQFEELYTFGGLDVEIIPQIERSQLREKALGHYKDIAKRLNNINKTIPSSWISNIDKYKKIFSEKYNFDKDNTGNFVVNIDKFNSLYSDLTNVMSEVVYSSQYNVKNRTHYFSRHYLPVFANILDDNIYTIRDGFNLTNKGFNIENSGQNIERNPALQKLSSESVVDLFTKVCVDGIITSKTKSDDDDKYADAIFTAAYRKVLAQLSARKALQDIASRALAGGGGSGGGGSGGGGSALALQCIKVKNNRLPYVADKDSISQEIFENKIITDETNVQNYSDKFSLDESILDGQVPINPEIVDPLLPNVNMEPLNLPGEEIVFYDDITKYVDYLNSYYYLESQKLSNNVENITLTTSVEEALGYSNKIYTFLPSLAEKVNKGVQAGLFLNWANEVVEDFTTNIMKKDTLDKISDVSVIIPYIGPALNIGNSALRGNFNQAFATAGVAFLLEGFPEFTIPALGVFTFYSSIQEREKIIKTIENCLEQRVKRWKDSYQWMVSNWLSRITTQFNHINYQMYDSLSYQADAIKAKIDLEYKKYSGSDKENIKSQVENLKNSLDVKISEAMNNINKFIRECSVTYLFKNMLPKVIDELNKFDLRTKTELINLIDSHNIILVGEVDRLKAKVNESFENTMPFNIFSYTNNSLLKDIINEYFN

SEQ ID NO: 81 - protein, 917 aa, Artificial Sequence
  source: /note="Description of Artificial Sequence: Synthetic polypeptide"
TWPVKDFNYSDPVNDNDILYLRIPQNKLITTPVKAFMITQNIWVIPERFSSDTNPSLSKPPRPTSKYQSYYDPSYLSTDEQKDTFLKGIIKLFKRINERDIGKKLINYLVVGSPFMGDSSTPEDTFDFTRHTTNIAVEKFENGSWKVTNIITPSVLIFGPLPNILDYTASLTLQGQQSNPSFEGFGTLSILKVAPEFLLTFSDVTSNQSSAVLGKSIFCMDPVIALMHELTHSLHQLYGINIPSDKRIRPQVSEGFFSQDGPNVQFEELYTFGGLDVEIIPQIERSQLREKALGHYKDIAKRLNNINKTIPSSWISNIDKYKKIFSEKYNFDKDNTGNFVVNIDKFNSLYSDLTNVMSEVVYSSQYNVKNRTHYFSRHYLPVFANILDDNIYTIRDGFNLTNKGFNIENSGQNIERNPALQKLSSESVVDLFTKVCVDGIITSKTKSDDDDKYADAIFTAAYRKVLAQLSARKALQDIMSRALAGGGGSGGGGSGGGGSALALQCIKVKNNRLPYVADKDSISQEIFENKIITDETNVQNYSDKFSLDESILDGQVPINPEIVDPLLPNVNMEPLNLPGEEIVFYDDITKYVDYLNSYYYLESQKLSNNVENITLTTSVEEALGYSNKIYTFLPSLAEKVNKGVQAGLFLNWANEVVEDFTTNIMKKDTLDKISDVSVIIPYIGPALNIGNSALRGNFNQAFATAGVAFLLEGFPEFTIPALGVFTFYSSIQEREKIIKTIENCLEQRVKRWKDSYQWMVSNWLSRITTQFNHINYQMYDSLSYQADAIKAKIDLEYKKYSGSDKENIKSQVENLKNSLDVKISEAMNNINKFIRECSVTYLFKNMLPKVIDELNKFDLRTKTELINLIDSHNIILVGEVDRLKAKVNESFENTMPFNIFSYTNNSLLKDIINEYFN

SEQ ID NO: 82 - protein, 920 aa, Artificial Sequence
  source: /note="Description of Artificial Sequence: Synthetic polypeptide"
TWPVKDFNYSDPVNDNDILYLRIPQNKLITTPVKAFMITQNIWVIPERFSSDTNPSLSKPPRPTSKYQSYYDPSYLSTDEQKDTFLKGIIKLFKRINERDIGKKLINYLVVGSPFMGDSSTPEDTFDFTRHTTNIAVEKFENGSWKVTNIITPSVLIFGPLPNILDYTASLTLQGQQSNPSFEGFGTLSILKVAPEFLLTFSDVTSNQSSAVLGKSIFCMDPVIALMHELTHSLHQLYGINIPSDKRIRPQVSEGFFSQDGPNVQFEELYTFGGLDVEIIPQIERSQLREKALGHYKDIAKRLNNINKTIPSSWISNIDKYKKIFSEKYNFDKDNTGNFVVNIDKFNSLYSDLTNVMSEVVYSSQYNVKNRTHYFSRHYLPVFANILDDNIYTIRDGFNLTNKGFNIENSGQNIERNPALQKLSSESVVDLFTKVCVDGIITSKTKSDDDDKHVDAIFTQSYRKVLAQLSARKALQDILSRQQGALAGGGGSGGGGSGGGGSALALQCIKVKNNRLPYVADKDSISQEIFENKIITDETNVQNYSDKFSLDESILDGQVPINPEIVDPLLPNVNMEPLNLPGEEIVFYDDITKYVDYLNSYYYLESQKLSNNVENITLTTSVEEALGYSNKIYTFLPSLAEKVNKGVQAGLFLNWANEVVEDFTTNIMKKDTLDKISDVSVIIPYIGPALNIGNSALRGNFNQAFATAGVAFLLEGFPEFTIPALGVFTFYSSIQEREKIIKTIENCLEQRVKRWKDSYQWMVSNWLSRITTQFNHINYQMYDSLSYQADAIKAKIDLEYKKYSGSDKENIKSQVENLKNSLDVKISEAMNNINKFIRECSVTYLFKNMLPKVIDELNKFDLRTKTELINLIDSHNIILVGEVDRLKAKVNESFENTMPFNIFSYTNNSLLKDIINEYFN

SEQ ID NO: 83 - protein, 917 aa, Artificial Sequence
  source: /note="Description of Artificial Sequence: Synthetic polypeptide"
TWPVKDFNYSDPVNDNDILYLRIPQNKLITTPVKAFMITQNIWVIPERFSSDTNPSLSKPPRPTSKYQSYYDPSYLSTDEQKDTFLKGIIKLFKRINERDIGKKLINYLVVGSPFMGDSSTPEDTFDFTRHTTNIAVEKFENGSWKVTNIITPSVLIFGPLPNILDYTASLTLQGQQSNPSFEGFGTLSILKVAPEFLLTFSDVTSNQSSAVLGKSIFCMDPVIALMHELTHSLHQLYGINIPSDKRIRPQVSEGFFSQDGPNVQFEELYTFGGLDVEIIPQIERSQLREKALGHYKDIAKRLNNINKTIPSSWISNIDKYKKIFSEKYNFDKDNTGNFVVNIDKFNSLYSDLTNVMSEVVYSSQYNVKNRTHYFSRHYLPVFANILDDNIYTIRDGFNLTNKGFNIENSGQNIERNPALQKLSSESVVDLFTKVCVDGIITSKTKSDDDDKHVDAIFTSSYRKVLAQLSARKLLQDILSRALAGGGGSGGGGSGGGGSALALQCIKVKNNRLPYVADKDSISQEIFENKIITDETNVQNYSDKFSLDESILDGQVPINPEIVDPLLPNVNMEPLNLPGEEIVFYDDITKYVDYLNSYYYLESQKLSNNVENITLTTSVEEALGYSNKIYTFLPSLAEKVNKGVQAGLFLNWANEVVEDFTTNIMKKDTLDKISDVSVIIPYIGPALNIGNSALRGNFNQAFATAGVAFLLEGFPEFTIPALGVFTFYSSIQEREKIIKTIENCLEQRVKRWKDSYQWMVSNWLSRITTQFNHINYQMYDSLSYQADAIKAKIDLEYKKYSGSDKENIKSQVENLKNSLDVKISEAMNNINKFIRECSVTYLFKNMLPKVIDELNKFDLRTKTELINLIDSHNIILVGEVDRLKAKVNESFENTMPFNIFSYTNNSLLKDIINEYFN

SEQ ID NO: 84 - protein, 917 aa, Artificial Sequence
  source: /note="Description of Artificial Sequence: Synthetic polypeptide"
TWPVKDFNYSDPVNDNDILYLRIPQNKLITTPVKAFMITQNIWVIPERFSSDTNPSLSKPPRPTSKYQSYYDPSYLSTDEQKDTFLKGIIKLFKRINERDIGKKLINYLVVGSPFMGDSSTPEDTFDFTRHTTNIAVEKFENGSWKVTNIITPSVLIFGPLPNILDYTASLTLQGQQSNPSFEGFGTLSILKVAPEFLLTFSDVTSNQSSAVLGKSIFCMDPVIALMHELTHSLHQLYGINIPSDKRIRPQVSEGFFSQDGPNVQFEELYTFGGLDVEIIPQIERSQLREKALGHYKDIAKRLNNINKTIPSSWISNIDKYKKIFSEKYNFDKDNTGNFVVNIDKFNSLYSDLTNVMSEVVYSSQYNVKNRTHYFSRHYLPVFANILDDNIYTIRDGFNLTNKGFNIENSGQNIERNPALQKLSSESVVDLFTKVCVDGIITSKTKSDDDDKHVDAIFTTSYRKVLAQLSARKLLQDILSRALAGGGGSGGGGSGGGGSALALQCIKVKNNRLPYVADKDSISQEIFENKIITDETNVQNYSDKFSLDESILDGQVPINPEIVDPLLPNVNMEPLNLPGEEIVFYDDITKYVDYLNSYYYLESQKLSNNVENITLTTSVEEALGYSNKIYTFLPSLAEKVNKGVQAGLFLNWANEVVEDFTTNIMKKDTLDKISDVSVIIPYIGPALNIGNSALRGNFNQAFATAGVAFLLEGFPEFTIPALGVFTFYSSIQEREKIIKTIENCLEQRVKRWKDSYQWMVSNWLSRITTQFNHINYQMYDSLSYQADAIKAKIDLEYKKYSGSDKENIKSQVENLKNSLDVKISEAMNNINKFIRECSVTYLFKNMLPKVIDELNKFDLRTKTELINLIDSHNIILVGEVDRLKAKVNESFENTMPFNIFSYTNNSLLKDIINEYFN

SEQ ID NO: 85 - protein, 917 aa, Artificial Sequence
  source: /note="Description of Artificial Sequence: Synthetic polypeptide"
TWPVKDFNYSDPVNDNDILYLRIPQNKLITTPVKAFMITQNIWVIPERFSSDTNPSLSKPPRPTSKYQSYYDPSYLSTDEQKDTFLKGIIKLFKRINERDIGKKLINYLVVGSPFMGDSSTPEDTFDFTRHTTNIAVEKFENGSWKVTNIITPSVLIFGPLPNILDYTASLTLQGQQSNPSFEGFGTLSILKVAPEFLLTFSDVTSNQSSAVLGKSIFCMDPVIALMHELTHSLHQLYGINIPSDKRIRPQVSEGFFSQDGPNVQFEELYTFGGLDVEIIPQIERSQLREKALGHYKDIAKRLNNINKTIPSSWISNIDKYKKIFSEKYNFDKDNTGNFVVNIDKFNSLYSDLTNVMSEVVYSSQYNVKNRTHYFSRHYLPVFANILDDNIYTIRDGFNLTNKGFNIENSGQNIERNPALQKLSSESVVDLFTKVCVDGIITSKTKSDDDDKYADAIFTQSYRKVLAQLSARKALQDILNRALAGGGGSGGGGSGGGGSALALQCIKVKNNRLPYVADKDSISQEIFENKIITDETNVQNYSDKFSLDESILDGQVPINPEIVDPLLPNVNMEPLNLPGEEIVFYDDITKYVDYLNSYYYLESQKLSNNVENITLTTSVEEALGYSNKIYTFLPSLAEKVNKGVQAGLFLNWANEVVEDFTTNIMKKDTLDKISDVSVIIPYIGPALNIGNSALRGNFNQAFATAGVAFLLEGFPEFTIPALGVFTFYSSIQEREKIIKTIENCLEQRVKRWKDSYQWMVSNWLSRITTQFNHINYQMYDSLSYQADAIKAKIDLEYKKYSGSDKENIKSQVENLKNSLDVKISEAMNNINKFIRECSVTYLFKNMLPKVIDELNKFDLRTKTELINLIDSHNIILVGEVDRLKAKVNESFENTMPFNIFSYTNNSLLKDIINEYFN

SEQ ID NO: 86 - protein, 917 aa, Artificial Sequence
  source: /note="Description of Artificial Sequence: Synthetic polypeptide"
TWPVKDFNYSDPVNDNDILYLRIPQNKLITTPVKAFMITQNIWVIPERFSSDTNPSLSKPPRPTSKYQSYYDPSYLSTDEQKDTFLKGIIKLFKRINERDIGKKLINYLVVGSPFMGDSSTPEDTFDFTRHTTNIAVEKFENGSWKVTNIITPSVLIFGPLPNILDYTASLTLQGQQSNPSFEGFGTLSILKVAPEFLLTFSDVTSNQSSAVLGKSIFCMDPVIALMHELTHSLHQLYGINIPSDKRIRPQVSEGFFSQDGPNVQFEELYTFGGLDVEIIPQIERSQLREKALGHYKDIAKRLNNINKTIPSSWISNIDKYKKIFSEKYNFDKDNTGNFVVNIDKFNSLYSDLTNVMSEVVYSSQYNVKNRTHYFSRHYLPVFANILDDNIYTIRDGFNLTNKGFNIENSGQNIERNPALQKLSSESVVDLFTKVCVDGIITSKTKSDDDDKYADAIFTQSYRKVLAQLSARKALQDILSRALAGGGGSGGGGSGGGGSALALQCIKVKNNRLPYVADKDSISQEIFENKIITDETNVQNYSDKFSLDESILDGQVPINPEIVDPLLPNVNMEPLNLPGEEIVFYDDITKYVDYLNSYYYLESQKLSNNVENITLTTSVEEALGYSNKIYTFLPSLAEKVNKGVQAGLFLNWANEVVEDFTTNIMKKDTLDKISDVSVIIPYIGPALNIGNSALRGNFNQAFATAGVAFLLEGFPEFTIPALGVFTFYSSIQEREKIIKTIENCLEQRVKRWKDSYQWMVSNWLSRITTQFNHINYQMYDSLSYQADAIKAKIDLEYKKYSGSDKENIKSQVENLKNSLDVKISEAMNNINKFIRECSVTYLFKNMLPKVIDELNKFDLRTKTELINLIDSHNIILVGEVDRLKAKVNESFENTMPFNIFSYTNNSLLKDIINEYFN

SEQ ID NO: 87 - protein, 916 aa, Artificial Sequence
  source: /note="Description of Artificial Sequence: Synthetic polypeptide"
TWPVKDFNYSDPVNDNDILYLRIPQNKLITTPVKAFMITQNIWVIPERFSSDTNPSLSKPPRPTSKYQSYYDPSYLSTDEQKDTFLKGIIKLFKRINERDIGKKLINYLVVGSPFMGDSSTPEDTFDFTRHTTNIAVEKFENGSWKVTNIITPSVLIFGPLPNILDYTASLTLQGQQSNPSFEGFGTLSILKVAPEFLLTFSDVTSNQSSAVLGKSIFCMDPVIALMHELTHSLHQLYGINIPSDKRIRPQVSEGFFSQDGPNVQFEELYTFGGLDVEIIPQIERSQLREKALGHYKDIAKRLNNINKTIPSSWISNIDKYKKIFSEKYNFDKDNTGNFVVNIDKFNSLYSDLTNVMSEVVYSSQYNVKNRTHYFSRHYLPVFANILDDNIYTIRDGFNLTNKGFNIENSGQNIERNPALQKLSSESVVDLFTKVCVDGIITSKTKSIEGRYADAIFTASYRKVLGQLSARKLLQDILSRALAGGGGSGGGGSGGGGSALALQCIKVKNNRLPYVADKDSISQEIFENKIITDETNVQNYSDKFSLDESILDGQVPINPEIVDPLLPNVNMEPLNLPGEEIVFYDDITKYVDYLNSYYYLESQKLSNNVENITLTTSVEEALGYSNKIYTFLPSLAEKVNKGVQAGLFLNWANEVVEDFTTNIMKKDTLDKISDVSVIIPYIGPALNIGNSALRGNFNQAFATAGVAFLLEGFPEFTIPALGVFTFYSSIQEREKIIKTIENCLEQRVKRWKDSYQWMVSNWLSRITTQFNHINYQMYDSLSYQADAIKAKIDLEYKKYSGSDKENIKSQVENLKNSLDVKISEAMNNINKFIRECSVTYLFKNMLPKVIDELNKFDLRTKTELINLIDSHNIILVGEVDRLKAKVNESFENTMPFNIFSYTNNSLLKDIINEYFN

SEQ ID NO: 88 - protein, 44 aa, Artificial Sequence
  GHRH Peptide Analogue
YADAIFTNSYRKVLGQLSARKLLQDIMSRQQGESNQERGARARL

SEQ ID NO: 89 - protein, 29 aa, Artificial Sequence
  GHRH Peptide Analogue
YADAIFTNSYRKVLGQLSARKLLQDIMSR

SEQ ID NO: 90 - protein, 29 aa, Artificial Sequence
  GHRH Peptide Analogue
YADAIFTNSYRKVLGQLSARKLLQDIMSR

SEQ ID NO: 91 - protein, 44 aa, Artificial Sequence
  GHRH Peptide Analogue
YADAIFTNSYRKILGQLSARKLLQDIMNRQQGERNQEQGAKVRL

SEQ ID NO: 92 - protein, 44 aa, Artificial Sequence
  GHRH Peptide Analogue
YADAIFTNSYRKVLGQLSARKLLQDIMNRQQGERNQEQGAKVRL

SEQ ID NO: 93 - protein, 29 aa, Artificial Sequence
  GHRH Peptide Analogue
HVDAIFTQSYRKVLAQLSARKLLQDILNR

SEQ ID NO: 94 - protein, 40 aa, Artificial Sequence
  GHRH Peptide Analogue
HVDAIFTQSYRKVLAQLSARKLLQDILNRQQGERNQEQGA

SEQ ID NO: 95 - protein, 14 aa, Artificial Sequence
  Bombesin
EQRLGNQWAVGHLM

SEQ ID NO: 96 - protein, 27 aa, Artificial Sequence
  Porcine GRP
APVSVGGGTVLAKMYPRGNHWAVGHLM

SEQ ID NO: 97 - protein, 27 aa, Artificial Sequence
  Human GRP
VPLPAGGGTVLTKMYPRGNHWAVGHLM

SEQ ID NO: 98 - protein, 6 aa, Artificial Sequence
  Urotensin Peptide Analogue
  MISC_FEATURE (2)..(2): Xaa is Ple
CXWKYC

SEQ ID NO: 99 - protein, 4 aa, Artificial Sequence
  Central region of Somatostatin
FWKT

SEQ ID NO: 100 - protein, 5 aa, Artificial Sequence
  Enterokinase protease cleavage sequence
DDDDK

SEQ ID NO: 101 - protein, 4 aa, Artificial Sequence
  Factor Xa protease cleavage sequence
IEGR

SEQ ID NO: 102 - protein, 4 aa, Artificial Sequence
  Factor Xa protease cleavage sequence
IDGR

SEQ ID NO: 103 - protein, 7 aa, Artificial Sequence
  TEV protease cleavage sequence
ENLYFQG

SEQ ID NO: 104 - protein, 6 aa, Artificial Sequence
  Thrombin protease cleavage sequence
LVPRGS

SEQ ID NO: 105 - protein, 8 aa, Artificial Sequence
  PreScission protease cleavage sequence
LEVLFQGP

SEQ ID NO: 106 - protein, 4 aa, Artificial Sequence
  Caspase 3 destructive cleavage site recognition sequence
DMQD

SEQ ID NO: 107 - protein, 10 aa, Artificial Sequence
  ADAM17 destructive cleavage site recognition sequence
PLAQAVRSSS

SEQ ID NO: 108 - protein, 10 aa, Artificial Sequence
  HAT destructive cleavage site recognition sequence
SKGRSLIGRV

SEQ ID NO: 109 - protein, 6 aa, Artificial Sequence
  Elastase (leukocyte) destructive cleavage site recognition sequence
MEAVTY

SEQ ID NO: 110 - protein, 4 aa, Artificial Sequence
  Furin destructive cleavage site recognition sequence
  MISC_FEATURE (2)..(2): Xaa is any amino acid residue
  MISC_FEATURE (3)..(3): Xaa is Arg or Lys
RXXR

SEQ ID NO: 111 - protein, 4 aa, Artificial Sequence
  Granzyme destructive cleavage site recognition sequence
IEPD

SEQ ID NO: 112 - protein, 4 aa, Artificial Sequence
  Caspase 2 destructive cleavage site recognition sequence
DVAD

SEQ ID NO: 113 - protein, 4 aa, Artificial Sequence
  Caspase 4 destructive cleavage site recognition sequence
LEVD

SEQ ID NO: 114 - protein, 4 aa, Artificial Sequence
  Caspase 7 destructive cleavage site recognition sequence
DEVD

SEQ ID NO: 115 - protein, 4 aa, Artificial Sequence
  Caspase 9 destructive cleavage site recognition sequence
LEHD

SEQ ID NO: 116 - protein, 4 aa, Artificial Sequence
  Caspase 10 destructive cleavage site recognition sequence
IEHD

SEQ ID NO: 117 - protein, 23 aa, Artificial Sequence
  Influenza virus haemagglutinin
GLFGAIAGFIENGWEGMIDGWYG

SEQ ID NO: 118 - protein, 9 aa, Artificial Sequence
  Fragment of TGF-alpha
  ACETYLATION (1)..(1): N-terminal acetylation
  METHYLATION (3)..(3): C-terminal methylation
CHSGYVGAR

SEQ ID NO: 119 - protein, 12 aa, Artificial Sequence
  Modified ErbB targeting moiety
YHWYGYTPQNVI

SEQ ID NO: 120 - protein, 116 aa, Artificial Sequence
  Somatostatin
MLSCRLQCALAALSIVLALGCVTGAPSDPRLRQFLQKSLAAAAGKQELAKYFLAELLSEPNQTENDALEPEDLSQAAEQDEMRLELQRSANSNPAMAPRERKAGCKNFFWKTFTSC

SEQ ID NO: 121 - protein, 155 aa, Artificial Sequence
  Cortistatin
MYRHKNSWRLGLKYPPSSKEETQVPKTLISGLPGRKSSSRVGEKLQSAHKMPLSPGLLLLLLSGATATAALPLEGGPTGRDSEHMQEAAGIRKSSLLTFLAWWFEWTSQASAGPLIGEEAREVARRQEGAPPQQSARRDRMPCRNFFWKTFSSCK

SEQ ID NO: 122 - protein, 7 aa, Artificial Sequence
  Targeting moiety for somatostatin receptor
NFFWKTF

SEQ ID NO: 123 - protein, 8 aa, Artificial Sequence
  Targeting moiety for somatostatin receptor
  MISC_FEATURE (1)..(1): Xaa is Arg or Lys
XNFFWKTF

SEQ ID NO: 124 - protein, 9 aa, Artificial Sequence
  Targeting moiety for somatostatin receptor
  MISC_FEATURE (2)..(2): Xaa is Arg or Lys
CXNFFWKTF

SEQ ID NO: 125 - protein, 10 aa, Artificial Sequence
  Targeting moiety for somatostatin receptor
  MISC_FEATURE (1)..(1): Xaa is Pro or Gly
  MISC_FEATURE (3)..(3): Xaa is Arg or Lys
XCXNFFWKTF

SEQ ID NO: 126 - protein, 8 aa, Artificial Sequence
  Targeting moiety for somatostatin receptor
  MISC_FEATURE (8)..(8): Xaa is Ser or Thr
NFFWKTFX

SEQ ID NO: 127 - protein, 9 aa, Artificial Sequence
  Targeting moiety for somatostatin receptor
  MISC_FEATURE (8)..(8): Xaa is Ser or Thr
NFFWKTFXS

SEQ ID NO: 128 - protein, 10 aa, Artificial Sequence
  Targeting moiety for somatostatin receptor
  MISC_FEATURE (8)..(8): Xaa is Ser or Thr
NFFWKTFXSC

SEQ ID NO: 129 - protein, 9 aa, Artificial Sequence
  Targeting moiety for somatostatin receptor
  MISC_FEATURE (1)..(1): Xaa is Arg or Lys
  MISC_FEATURE (9)..(9): Xaa is Ser or Thr
XNFFWKTFX

SEQ ID NO: 130 - protein, 10 aa, Artificial Sequence
  Targeting moiety for somatostatin receptor
  MISC_FEATURE (1)..(1): Xaa is Arg or Lys
  MISC_FEATURE (9)..(9): Xaa is Ser or Thr
XNFFWKTFXS

SEQ ID NO: 131 - protein, 11 aa, Artificial Sequence
  Targeting moiety for somatostatin receptor
  MISC_FEATURE (1)..(1): Xaa is Arg or Lys
  MISC_FEATURE (9)..(9): Xaa is Ser or Thr
XNFFWKTFXSC

SEQ ID NO: 132 - protein, 10 aa, Artificial Sequence
  Targeting moiety for somatostatin receptor
  MISC_FEATURE (2)..(2): Xaa is Arg or Lys
  MISC_FEATURE (10)..(10): Xaa is Ser or Thr
CXNFFWKTFX

SEQ ID NO: 133 - protein, 11 aa, Artificial Sequence
  Targeting moiety for somatostatin receptor
  MISC_FEATURE (2)..(2): Xaa is Arg or Lys
  MISC_FEATURE (10)..(10): Xaa is Ser or Thr
CXNFFWKTFXS

SEQ ID NO: 134 - protein, 12 aa, Artificial Sequence
  Targeting moiety for somatostatin receptor
  MISC_FEATURE (2)..(2): Xaa is Arg or Lys
  MISC_FEATURE (10)..(10): Xaa is Ser or Thr
CXNFFWKTFXSC

SEQ ID NO: 135 - protein, 11 aa, Artificial Sequence
  Targeting moiety for somatostatin receptor
  MISC_FEATURE (1)..(1): Xaa is Pro or Gly
  MISC_FEATURE (3)..(3): Xaa is Arg or Lys
  MISC_FEATURE (11)..(11): Xaa is Ser or Thr
XCXNFFWKTFX

SEQ ID NO: 136 - protein, 12 aa, Artificial Sequence
  Targeting moiety for somatostatin receptor
  MISC_FEATURE (1)..(1): Xaa is Pro or Gly
  MISC_FEATURE (3)..(3): Xaa is Arg or Lys
  MISC_FEATURE (11)..(11): Xaa is Ser or Thr
XCXNFFWKTFXS

SEQ ID NO: 137 - protein, 13 aa, Artificial Sequence
  Targeting moiety for somatostatin receptor
  MISC_FEATURE (1)..(1): Xaa is Pro or Gly
  MISC_FEATURE (3)..(3): Xaa is Arg or Lys
  MISC_FEATURE (11)..(11): Xaa is Ser or Thr
XCXNFFWKTFXSC

SEQ ID NO: 138 - protein, 28 aa, Artificial Sequence
  Somatostatin Targeting Moiety
SANSNPAMAPRERKAGCKNFFWKTFTSC

SEQ ID NO: 139 - protein, 14 aa, Artificial Sequence
  Somatostatin Targeting Moiety
AGCKNFFWKTFTSC

SEQ ID NO: 140 - protein, 29 aa, Artificial Sequence
  Cortistatin Targeting Moiety
QEGAPPQQSARRDRMPCRNFFWKTFSSCK

SEQ ID NO: 141 - protein, 29 aa, Artificial Sequence
  Cortistatin Targeting Moiety
QERPPLQQPPHRDKKPCKNFFWKTFSSCK

SEQ ID NO: 142 - protein, 29 aa, Artificial Sequence
  Cortistatin Targeting Moiety
QERPPPQQPPHLDKKPCKNFFWKTFSSCK

SEQ ID NO: 143 - protein, 17 aa, Artificial Sequence
  Cortistatin Targeting Moiety
DRMPCRNFFWKTFSSCK

SEQ ID NO: 144 - protein, 14 aa, Artificial Sequence
  Cortistatin Targeting Moiety
PCRNFFWKTFSSCK

SEQ ID NO: 145 - protein, 14 aa, Artificial Sequence
  Cortistatin Targeting Moiety
PCKNFFWKTFSSCK

SEQ ID NO: 146 - protein, 29 aa, Artificial Sequence
  Targeting Moiety for GH-Secreting Cell
YADAIFTASYRKVLGQLSARKLLQDILSR

SEQ ID NO: 147 - protein, 29 aa, Artificial Sequence
  Targeting Moiety for GH-Secreting Cell
YADAIFTASYRNVLGQLSARKLLQDILSR

SEQ ID NO: 148 - protein, 27 aa, Artificial Sequence
  Targeting Moiety for GH-Secreting Cell
YADAIFTNSYRKVLGQLSARKLLQDIM

SEQ ID NO: 149 - protein, 28 aa, Artificial Sequence
  Targeting Moiety for GH-Secreting Cell
YADAIFTNSYRKVLGQLSARKLLQDIMS

SEQ ID NO: 150 - protein, 28 aa, Artificial Sequence
  Targeting Moiety for GH-Secreting Cell
ADAIFTNSYRKVLGQLSARKLLQDIMSR

SEQ ID NO: 151 - protein, 44 aa, Artificial Sequence; identical to SEQ ID NO: 88
  Targeting Moiety for GH-Secreting Cell

SEQ ID NO: 152 - protein, 40 aa, Artificial Sequence
  Targeting Moiety for GH-Secreting Cell
YADAIFTNSYRKVLGQLSARKLLQDIMSRQQGESNQERGA

SEQ ID NO: 153 - protein, 29 aa, Artificial Sequence
  Targeting Moiety for GH-Secreting Cell
YADAIFTNAYRKVLGQLSARKLLQDIMSR

SEQ ID NO: 154 - protein, 29 aa, Artificial Sequence
  Targeting Moiety for GH-Secreting Cell
YADAIFTNSYRKVLGQLSARKALQDIMSR

SEQ ID NO: 155 - protein, 29 aa, Artificial Sequence
  Targeting Moiety for GH-Secreting Cell
YADAIFTASYKKVLGQLSARKLLQDIMSR

SEQ ID NO: 156 - protein, 29 aa, Artificial Sequence
  Targeting Moiety for GH-Secreting Cell
YADAIFTASYKRVLGQLSARKLLQDIMSR

SEQ ID NO: 157 - protein, 29 aa, Artificial Sequence
  Targeting Moiety for GH-Secreting Cell
YADAIFTASYNKVLGQLSARKLLQDIMSR

SEQ ID NO: 158 - protein, 29 aa, Artificial Sequence
  Targeting Moiety for GH-Secreting Cell
YADAIFTASYRKVLGQLSAKKLLQDIMSR

SEQ ID NO: 159 - protein, 29 aa, Artificial Sequence
  Targeting Moiety for GH-Secreting Cell
YADAIFTASYKKVLGQLSAKKLLQDIMSR

SEQ ID NO: 160 - protein, 29 aa, Artificial Sequence
  Targeting Moiety for GH-Secreting Cell
YADAIFTASYRKVLGQLSANKLLQDIMSR

SEQ ID NO: 161 - protein, 29 aa, Artificial Sequence
  Targeting Moiety for GH-Secreting Cell
YADAIFTASYRNVLGQLSARKLLQDIMSR

SEQ ID NO: 162 - protein, 29 aa, Artificial Sequence
  Targeting Moiety for GH-Secreting Cell
YADAIFTASYRKVLGQLSARNLLQDIMSR

SEQ ID NO: 163 - protein, 29 aa, Artificial Sequence
  Targeting Moiety for GH-Secreting Cell
YADAIFEASYRKVLGQLSARKLLQDIMSR

SEQ ID NO: 164 - protein, 29 aa, Artificial Sequence
  Targeting Moiety for GH-Secreting Cell
YADAIFTASERKVLGQLSARKLLQDIMSR

SEQ ID NO: 165 - protein, 29 aa, Artificial Sequence
  Targeting Moiety for GH-Secreting Cell
YADAIFTASYRKELGQLSARKLLQDIMSR

SEQ ID NO: 166 - protein, 29 aa, Artificial Sequence
  Targeting Moiety for GH-Secreting Cell
YADAIFTASYRKVLGQLSARKLLQDIMSR

SEQ ID NO: 167 - protein, 29 aa, Artificial Sequence
  Targeting Moiety for GH-Secreting Cell
YADAIFTESYRKVLGQLSARKLLQDIMSR

SEQ ID NO: 168 - protein, 27 aa, Artificial Sequence
  Targeting Moiety for GH-Secreting Cell
YADAIFTNSYRKVLAQLSARKLLQDIM

SEQ ID NO: 169 - protein, 29 aa, Artificial Sequence
  Targeting Moiety for GH-Secreting Cell
YADAIFTNSYRKVLAQLSARKLLQDIMSR

SEQ ID NO: 170 - protein, 29 aa, Artificial Sequence
  Targeting Moiety for GH-Secreting Cell
YADAIFTASYRKVLAQLSARKLLQDIMSR

SEQ ID NO: 171 - protein, 29 aa, Artificial Sequence
  Targeting Moiety for GH-Secreting Cell
YADAIFTAAYRKVLAQLSARKALQDIASR

SEQ ID NO: 172 - protein, 29 aa, Artificial Sequence
  Targeting Moiety for GH-Secreting Cell
YADAIFTAAYRKVLAQLSARKALQDIMSR

SEQ ID NO: 173 - protein, 40 aa, Artificial Sequence; identical to SEQ ID NO: 94
  Targeting Moiety for GH-Secreting Cell

SEQ ID NO: 174 - protein, 32 aa, Artificial Sequence
  Targeting Moiety for GH-Secreting Cell
HVDAIFTQSYRKVLAQLSARKALQDILSRQQG

SEQ ID NO: 175 - protein, 29 aa, Artificial Sequence
  Targeting Moiety for GH-Secreting Cell
HVDAIFTSSYRKVLAQLSARKLLQDILSR

SEQ ID NO: 176 - protein, 29 aa, Artificial Sequence
  Targeting Moiety for GH-Secreting Cell
HVDAIFTTSYRKVLAQLSARKLLQDILSR

SEQ ID NO: 177 - protein, 29 aa, Artificial Sequence
  Targeting Moiety for GH-Secreting Cell
YADAIFTQSYRKVLAQLSARKALQDILNR

SEQ ID NO: 178 - protein, 29 aa, Artificial Sequence
  Targeting Moiety for GH-Secreting Cell
YADAIFTQSYRKVLAQLSARKALQDILSR

SEQ ID NO: 179 - protein, 15 aa, Artificial Sequence
  Serothype C Linker
HKAIDGRSLYNKTLD

SEQ ID NO: 180 - protein, 15 aa, Artificial Sequence
  Native Recognition Sequence for Factor Xa
VDAIDGRSLYNKTLQ

SEQ ID NO: 181 - protein, 23 aa, Artificial Sequence
  Enterokinase Activation Site
VDGIITSKTKSDDDDKNKALNLQ

1. A polypeptide, for use in suppressing a cancer, said polypeptide comprising:
a) a non-cytotoxic protease, which protease is capable of cleaving a protein of the exocytic fusion apparatus in a growth hormone-secreting cell;
b) a Targeting Moiety (TM) that binds to a Binding Site on a growth hormone-secreting cell, which Binding Site is capable of undergoing endocytosis to be incorporated into an endosome within the growth hormone-secreting cell; and
c) a translocation domain that translocates the protease from within the endosome, across the endosomal membrane and into the cytosol of said growth hormone-secreting cell.

2. A polypeptide according to claim 1, wherein the growth hormone-secreting cell is a pituitary cell.

3. A polypeptide according to claim 1, wherein the TM binds to a receptor selected from the group consisting of: a growth hormone-releasing hormone (GHRH) receptor, a leptin (OB) receptor, a ghrelin receptor, a somatostatin (sst) receptor, an insulin growth factor (IGF) receptor, an ErbB receptor, a VIP-glucagon-GRF-secretin superfamily receptor, an orexin (OX) receptor, an interleukin (IL) receptor, a nerve growth factor (NTR) receptor, a vascular endothelial growth factor (VEGF) receptor, a bombesin receptor, a urotensin receptor, a melanin-concentrating hormone receptor 1, a prolactin releasing hormone receptor, a KISS-1 receptor, and a corticotropin-releasing factor receptor 1.

4. A polypeptide according to claim 1, wherein the TM is selected from the group consisting of: a growth hormone-releasing hormone (GHRH) peptide, a leptin peptide, a ghrelin peptide, a somatostatin (SST) peptide, a cortistatin peptide, an insulin-like growth factor (IGF) peptide, a transforming growth factor (TGF) peptide, a VIP-glucagon-GRF-secretin superfamily peptide, a PACAP peptide, a vasoactive intestinal peptide (VIP), an orexin peptide, an interleukin peptide, a nerve growth factor (NGF) peptide, a vascular endothelial growth factor (VEGF) peptide, a thyroid hormone peptide, an oestrogen peptide, an ErbB peptide, an epidermal growth factor (EGF) peptide, an EGF and TGF-α chimera peptide, an amphiregulin peptide, a betacellulin peptide, an epigen peptide, an epiregulin peptide, a heparin-binding EGF (HB-EGF) peptide, a bombesin peptide, a urotensin peptide, a melanin-concentrating hormone (MCH) peptide, a prolactin releasing peptide, a Kisspeptin-10 peptide, a Kisspeptin-54 peptide, a corticotropin-releasing hormone peptide, a urocortin 1 peptide, and a urocortin 2 peptide.

5. A polypeptide for use according to claim 1, wherein the non-cytotoxic protease comprises a clostridial neurotoxin endopeptidase.

6. A polypeptide according to claim 1, wherein the non-cytotoxic protease comprises an IgA protease.

7. A polypeptide according to claim 1, wherein the translocation domain comprises a clostridial neurotoxin translocation domain.

8. A polypeptide comprising:
a) non-cytotoxic protease, which protease is capable of cleaving a protein of the exocytic fusion apparatus in a growth hormone-secreting cell;
b) a Targeting Moiety (TM) that binds to a Binding Site on a growth hormone-secreting cell, which Binding Site is capable of undergoing endocytosis to be incorporated into an endosome within the growth hormone-secreting cell; and
c) a translocation domain that translocates the protease from within the endosome, across the endosomal membrane and into the cytosol of said growth hormone-secreting cell.

9. A polypeptide according to claim 8, wherein the growth hormone-secreting cell is a pituitary cell.

10. A polypeptide according to claim 8, wherein the TM binds to a receptor selected from the group consisting of: a growth hormone-releasing hormone (GHRH) receptor, a leptin (OB) receptor, a ghrelin receptor, a somatostatin (sst) receptor, an insulin growth factor (IGF) receptor, an ErbB receptor, a VIP-glucagon-GRF-secretin superfamily receptor, an orexin (OX) receptor, an interleukin (IL) receptor, a nerve growth factor (NTR) receptor, a vascular endothelial growth factor (VEGF) receptor, a bombesin receptor, a urotensin receptor, a melanin-concentrating hormone receptor 1, a prolactin releasing hormone receptor, a KiSS-1 receptor, and a corticotropin-releasing factor receptor 1.

11. A polypeptide according to claim 8, wherein the TM is selected from the group consisting of: a growth hormone-releasing hormone (GHRH) peptide, a leptin peptide, a ghrelin peptide, a somatostatin (SST) peptide, a cortistatin peptide, an insulin-like growth factor (IGF) peptide, a transforming growth factor (TGF) peptide, a VIP-glucagon-GRF-secretin superfamily peptide, a PACAP peptide, a vasoactive intestinal peptide (VIP), an orexin peptide, an interleukin peptide, a nerve growth factor (NGF) peptide, a vascular endothelial growth factor (VEGF) peptide, a thyroid hormone peptide, an oestrogen peptide, an ErbB peptide, an epidermal growth factor (EGF) peptide, an EGF and TGF-α chimera peptide, an amphiregulin peptide, a betacellulin peptide, an epigen peptide, an epiregulin peptide, a heparin-binding EGF (HB-EGF) peptide, a bombesin peptide, a urotensin peptide, a melanin-concentrating hormone (MCH) peptide, a prolactin releasing peptide, a Kisspeptin-10 peptide, a Kisspeptin-544 peptide, a corticotropin-releasing hormone peptide, a urocortin 1 peptide, and a urocortin 2 peptide.

12. A polypeptide according to claim 8, wherein the non-cytotoxic protease comprises a clostridial neurotoxin endopeptidase.

13. A polypeptide according to claim 8, wherein the non-cytotoxic protease comprises an IgA protease.

14. A polypeptide according to claim 8, wherein the translocation domain comprises a clostridial neurotoxin translocation domain.

15. A polypeptide according to claim 8, wherein said polypeptide comprises an amino acid sequence having at least 90-92%, or at least 95-97%, or at least 98-99% sequence identity to any one of SEQ ID NOs: 8, 9, 10, 11, 12, 13, 14, 15, 16, 17, 18, 19, 20, 21, 22, 23, 24, 25, 26, 27, 28, 29, 30, 33, 34, 35, 36, 37, 38, 39, 40, 41, 42, 43, 44, 53, 54, 55, 56, 57, 58, 59, 60, 61, 62, 63, 64, 65, 66, 67, 68, 69, 70, 71, 72, 73, 74, 75, 76, 77, 78, 79, 80, 81, 82, 83, 84, 85, 86, 87.

16. A nucleic acid sequence encoding a polypeptide according to claim 8.

17. A nucleic acid encoding a polypeptide according to claim 8, wherein said nucleic acid comprises a nucleic acid sequence haying at least 90-94%, or at least 95-97%, or at least 98-99% sequence identity to any one of SEC, ID NOs: 7 and 32.

18. A method of suppressing cancer in a patient, comprising administering to the patient an effective amount of a polypeptide according to claim 8.

19. The method according to claim 18, wherein the cancer is selected from the group consisting of prostate cancer, lung cancer, breast cancer, and colorectal cancer.

20. A method of suppressing cancer in a patient, comprising administering to the patient an effective amount of a nucleic acid according to claim 16.
